United States Patent Application Publication US 2025/0179533 A1 - sequence listing, part 2

SEQ ID NO: 5 - DNA, 372654 bp, synthetic construct
  source 1..372654: mol_type = other DNA; note = UBAP2 Contig Sequence
  misc_difference 1..372654: note = N can be a,g,c,t
tgagaaggacatagacacgacattcacatggctgagtggatgaggggctcgtaggaaggagacttgagtttgagggcagggaacctgattgggaaaagggactttctccccatcctctccgacttctcatgctaaacgcctgcacacaatctactccatatctcccgcacacttctcttgtgagccccctctcagagccccctcatggcaaatggcctcgtcccctaccctgcgctcagcactaacatgtagcagagtgctggacaaaaagtcctttgggacaagaaagaggagcaaagaggaagggactgaagggagtaggggtgggatgataggggggggggggaactggnnnnnnnnnnnnnnnnnnnnnnnnnnnnnnnnnnnnnnnnnnnnnnnnnnnnnnnnnnnnnnnnnnnnnnnnnnnnnnnnnnnnnnnnnnnnnnnnnnnnnnnnnnnnnnnnnnnnnnnnnnnnnnnnnnnnnnnnnnnnnnnnnnnnnnnnnnnnnnnnnnnnnnnnnnnnnnnnnnnnnnnnnnnnnnnnnnnnnnnnnnnnnnnnnnnnnnnnnnnnnnnnnnnnnnnnnnnnnnnnnnnnnnnnnnnnnnnnnnnnnnnnnnnnnnnnnnnnnnnnnnnnnnnnnnnnnnnnnnnnnnnnnnnnnnnnnnnnnnnnnnnnnnnnnnnnnnnnnnnnnnnnnnnnnnnnnnnnnnnnnnnnnnnnnnnnnnnnnnnnnnnnnnnnnnnnnnnnnnnnnnnnnnnnnnnnnnnnnnnnnnnnnnnnnnnnnnnnnnnnnnnnnnnnnnnnnnnnnnnnnnnnnnnnnnnnnnnnnnnnnnnnnnnnnnnnnnnnnnnnnnnnnnnnnnnnnnnnnnnnnnnnnnnnnnnnnnnnnnnnnnnnnnnnnnnnnnnnnnnnnnnnnnnnnnnnnnnnnnnnnnnnnnnnnnnnnnnnnnnnnnnnnnnnnnnnnnnnnnnnnnnnnnnnnnnnnnnnnnnnnnnnnnnnnnnnnnnnnnnnnnnnnnnnnnnnnnnnnnnnnnnnnnnnnnnnnnnnnnnnnnnnnnnnnnnnnnnnnnnnnnnnnnnnnnnnnnnnnnnnnnnnnnnnnnnnnnnnnnnnnnnnnnnnnnnnnnnnnnnnnnnnnnnnnnnnnnnnnnnnnnnnnnnnnnnnnnnnnnnnnnnnnnnnnnnnnnnnnnnnnnnnnnnnnnnnnnnnnnnnnnnnnnnnnnnnnnnnnnnnnnnnnnnnnnnnnnnnnnnnnnnnnnnnnnnnnnnnnnnnnnnnnnnnnnnnnnnnnnnnnnnnnnnnnnnnnnnnnnnnnnnnnnnnnnnnnnnnnnnnnnnnnnnnnnnnnnnnnnnnnnnnnnnnnnnnnnnnnnnnnnnnnnnnnnnnnnnnnnnnnnnnnnnnnnnnnnnnnnnnnnnnnnnnnnnnnnnnnnnnnnnnnnnnnnnnnnnnnnnnnnnnnnnnnnnnnnnnnnnnnnnnnnnnnnnnnnnnnnnnnnnnnnnnnnnnnnnnnnnnnnnnnnnnnnnnnnnnnnnnnnnnnnnnnnnnnnnnnnnnnnnnnnnnnnnnnnnnnnnnnnnnnnnnnnnnnnnnnnnnnnnnnnnnnnnnnnnnnnnnnnnnnnnnnnnnnnnnnnnnnnnnnnnnnnnnnnnnnnnnnnnnnnnnnnnnnnnnnnnnnnnnnnnnnnnnnnnnnnnnnnnnnnnnnnnnnnnnnnnnnnnnnnnnnnggcttttagaaaaggagaggcctgccccccagtcctttatataaatagcaaagctgaacaggaaccaggcaccgatgggggcagaggttcggtgcaggacctgggaattcccttcttctcaagagaggagcgcccccagttcaagctgggggcatctggaatcgggtaggggaagagtgtgtggtggcgagatgaagaatcaagggtgtccatgagaacactaaggtgccaccagaataggaggtggagctgtgctggagcagccnnnnnnnnnnnnnnnnnnnnnnnnnnnnnnnnnnnnnnnnnnnnnnnnnnnnnnnnnnnnnnnnnnnnnnnnnnnnnnnnnnnnnnnnnnnnnnnnnnnnnnnnnnnnnnnnnnnnnnnnnnnnnnnnaggggatggaagggggagggtgataccgatttatggaggcatggcctaaagaagaggatgcttgctggccattgccctggggctacctggctgtcattgctgacagcaaatgggtaggaaagtcacaggcctatccagctggactagagaagggagaggggaaaagaatgcttaggctgtgttcattcacttaacccaccttggggccagggctgcaagagctaaaacgatgcaggataggccaggaaccaagaggtatggatgcttgccttgccctctgctggcactgacatgtgctctcccactcctgaaacccaaggggctgcctaagcctcttccctctgttagtcagagtggcccagaataagttcttctcttgggcctgcagcttcagaattgacaatatgctttgtggtttcctagataagtaacttgcctattacagtagccaagaaggaccaaggtgggaactatgccatatagtttgctggataattagttgccatctagctggagatgtgtgtcttctacattttgtaatgctgagacagatgagctttgtagaagtgtacaatattcagtggagagaatcctgcagggcttttttcctaccttgatgccaccactgaattatttgggaaccagaaaatccctggggagaagtttgttctatgaacataaagaaggaccttggctgggttagaactttgcttaataggctccctattcagctaaccttgtttccaaactaggatgcccttccagttctaagctaatcgtgtgtggatgggtggatgaaaggggtggaggttctggtaagttgaagaaaggagtggttcttgtttctcatctgaggttcctgaaataatagctaaggaaagagaagaaagagtaaggccatcaggattgtgcacttgtcttggtgactctgtatttctggtattctttcttaatcatggtcggaagagtcctgagctgttttggtttgtatggccctgaagaaatagtttgtggtgaggaggtgctcattagaatagctgtagctgcccatgcccttttttgaaagctaaagcagtcttcaagagaacactgggttgaggctgagtgaatcttaaagaaataacaatacagtctaacacttgggggtcatagacagtaccctgtttcttgactcttgctcctttattggagtctagagacaccccagactcttaagtaccctttatctcattgagaacagcagaatcatgtatagcgcttccccaaggagccttcatttgggttgtagggaatcaagatgcacaccgcagaggtggagggcagagtggctccgtagccatgtttggcgaaagaccatcaaaactagggccccaggctcagattcacctgtgatcccttccattttctgctattatttatggtgacttctaggaagtctcttgtcctccctgaactgtttttccatttacaaaacaaactattcatttaatgtttaaacaataaatagttcctcattctcccttccaaaggatatcatggagactgatgtaccaactcaggaaattgatttcccaaatactgaatgtctacactgttccagatactcacaagatatcagggacatggtagttagccacagaagctcagatgggcctgccctgctggatcacacagttcagtaagagctgatttgtgttgctcactccctgagagcattgtggagtctgcctccttagaccccaagaaaagatgaaagctttggtattggccttattgcccctttcaggacctgggcgtacaaacaagggcctgtgtctaggaccccaccatcaaataatcctccctcaatgagaagcatctttttctttatttttacttgaaagagaaactcatcttgaaaaagaggcttgggggagtggcagcactttagagggaaggtgcagccagtagatctgggtgtttccaaggtgctaatttaagcattagctctcagctcgtgggaggcagaggaagaaatccctgccctgttgttgctgctgctgctgttaccacagctgcctggagcctcctgtccggggtgggagtttgcccaaaaggagtagcttcccttctttccctatcaggccagttatttaattggcctggctgcatctcagcagctgaaccaggtcccagcctatccctgagctccccagggtctcttcttgtctccttaggaaatgagagctcttcttggtgatctattccctgggctctgttcctgctgtgtctgtctcccagaaactttggagtggcccattaattgtgccagctgtgccatacacctcactaatccagggaaactccctgcttcccagggctctgttgaacaattgagtatatttgggctgttgttggtatgagtggcagcaggcacaagccctctggcctgttgtctgtacagccacacaatctacatcttggaagagatttgttgcaagaaaaacaaatagagcttttgagtacttaatttcatccagcaatactctccctcctgtgcagtcaaaggcataagatacttactgagtggcatatggcagcagacgtggtccctgccggcttgagagaatgctagtctagcctcaatgaaaccagattacccattaactcatttgtttagttcagagtgtttgctacgtatctgctcagttcctggtactttaagaatacaaagactagtaaaggcttcacttatggatctccaggagaaggaggggctcgaatgataacaggaaggtttatagatgtatgtcagaatgcatattaatggatggtgatcctgagagaatgctgccattttgaccctttggctgttgtagctggaagaggagtttaagacttctgttgcctgctgactctaagggatgaagattgccagggtgtcaactcagtcactgggccacaggagctcctgagagtggaaaggagagcatcacaaaggaagtcaacactgaggaagactaacctatatgtctgctctggtttatgtgcctttaagttgttccttgtagtcagatggatcttcagttttaagggggtagctgctggggagaagacattctctttatcttcctccatggaaaactggggttgggtttgccaaagccttaatctttacctacatagctccttctccaaaatacactatggaagaacctagatgttgttctgggctcaacaaacagactctcactgcaggagtatacccagagaagggttgactgaggtaccatgggataatgagtaccacaggagaaccaagaagcagggcccaaggcccaaagatgggttcttatccgatggtaagggaggccttcatagagaagcaactgctaaccagctcttagaagagtattaggaataccagtcagacatggtacagaaaaggcaagacttccaggcaccagacatggaagaagaaacaaaagagtacatttgggatgaagtaaagcctgtaactaagagaaacagatttgagcttaggatactactttagtggtgaacgagagattagcgaaagtgaggttggagggtgagacgtcagtagggagactggataagagatggtgaggccagagtaaaagcagatgtgcataaaatgccagggcagggtatggagccgctttagatgtggaatgcacagctagagaatcagagctgaccccaaggttcctgatgtggacatttgaatggaggaagggaccaccgccaaccatctcaggaaatgtgggagccgtgcccttgttttggtgacttcttgtaaaacacggtttctcttttcctttgctgaacttctgagattatggggaactcgggagttctagaaaacaaacatgatgacagtgaccccagcctcacagggtcacagagtatgtgctcctctaaataatttctgcattgcagcctactttgctgagtacagagaattggtggcagcaagaaaccatagtcgggtttttatttattgttttctagacatgttactcagtaagtcactaaagatgacttgaactcttgatcatcctgctgctgcctctgtatgtagcagagaagataaatcacagtatacccaaagatgactttgaactttgtatcttctgccccccaccttctaagcactgagattccagtgtaatctgaaatcctctgacctggtataattctcatcatctattttgtcaaatttacagttttatttcactggtttattctaccatgactatctgcaagagtcataagaggtaggacgtatgctgcccttttctgaaagtatttcatataccctgcaagctgtacttggagttgaaacctggatgctactcctgtgcaggcaaggggtgctgaagaaacagactcccctggtgagagcacttaccaagtgccccagtgtgactttgcaggaggtaatcccatagtagttggtgttcaggctgagaccttcacaggcccattgcccttaactgcttctagccctgggcaaacaggaatgggaagtagacacttctttcctggaacttcattagcttctgggccccactcccctccaggaaagggcagaaggagggctaaggttgtatctcagttagtagagcacttgagtaggaaaccttgggttccatcctcaccactgcacaaactgagtgtgataatgcttacctgtaaccccagcacttagaaaaggggagcaggaggatcaaaaatttgacatcatccttggctacataataagtttgaggccagcctgggctacatgaggttctgtctcaaaacacaaagaaaggtgggctagagatatggctccatggttaagagtgtttttagctcttctgagcctgagttcagttcccaggacccatgttgtatgtggctcatagccacctgcaactccagttctaaggcatcccacatcttctcgttcccacaggtatccacatacattcacacagatgcacacacacacacacacacacacacacacacacacacacacacacacacacacacacactggtgctttgtggtttttgtttttttttttatcagtttgacacaagctagagctatctgagagcagggagctacaattgagaaaatgcctccatgagattggcatgtaagcaagcctgtggggtatttttgaaattagtgatcaattgtgggtggtgccaccctgggcagatgttcctggggtatataagaaagtggactgagcaagccatgaggagcaagccagtaagcagcattccatggcctctgctccagtgccttccttcaggttcttgccctgacttttctcagggatgcagagtaacctgacaattgtaagctgaaatagacccttttctctccaagttgctttcagtcatggtatttatcacagcaattaaaacctaagacaagccttatgcctggaaaggagaaatagaaactacttcttgtgcttagcttagctgtactgtgcctttcagctgactgggaaaactggtacaaagagtcacaagagaggcaggaatggagacaatcaggctgaagcagccacccagagttctgattgaagtctggagccattgttccctaaggaggctggtacaatgggtctgtaacccagcgccagagagagtgacaggcggatccctggagcccgatggccagcaatctgtgagctccaggttcagtgaaacagcctgtctcaaaaaataaaatggaattgataagggaaaaactctacattgatctctggcttccagatgtgctcacacaagtgtatacacaaaccggcatgcatgtgtgcatgacctatacaaacatacccaaggacctagagagatggctcagtggttaaaagcactggttgttcttccagaggacccaggttcagttcccagaactcacatcaagtagctcaaaactgcctatagctccagcccccagctccaggggttccaactctctcttctggccactatgggcatcctcacacacacagcacacacgtgtgtacgcacacacacataaataaaaatcaaaaatcctcaaaattccatttaaaaatattttctgaattgctgagcatggggtatacacctttaactctaatgctagggaggctgaggcaggaggatcttgagcttgggtccagtttgggatacacagcaagctccaggccagcatgggctacaacactgtgtgggaaaaataaaaaactgaataacacaaactgtaaagtgagaatctatgtatttcaatatatagttaattttagtataactacagtcaatctgtaagttatttatggttcccatatttattgtatacttgtatagaaaatagtgatcatcagccaaaatgacttagaactgcatctcctatggtattttgttaagaatactgatcctttgggatacttatgatgaaaaggctttctacaccaattccttgggaaaacactcctgtgctaccctactagggtactcactagcatttaaaggctctgagaagccctgccctaaagcagcatcttcaactgtgttaagctcaatctttcccatactatgtagccttggctgcccccctgccaaaaccccagctatttgcccgcctttactaatctcgggtgttggtaccaccacacccagcccagaacattactcctcaatgttacactactaacatcttacagactcagcgtgttttattgaatcatctctagtctctggcttagaagagtctgtgttctgattgactctaaatggatattcttctctgttcttttttttaacttttaaatatctgtttatcttattttatgtctaagagtgttcaggttgtgtaccatatgtgtgcctggtatctgcagatgtcagaagaggacatcaaatcccctgagactggagttgcaggtggttgtaagccaccacgtgtgttctgggaatcaaactcagggcctctagaagaacaagtacttttaagcaccgaatatctctccagccccttccctgttcctttgagcctctctcagaaatcacaccatcttacccagtgttgggcctagtgggatattgctgacttgactcagggcctgactggcagctgccagcagcaagtttctcatgatctctgatagaggagcacacatacacagggccttgtctttctcataatttgaggggaaaaaaaaattactttccttctgttcagttttgtgggtagtttgtttttacaaatttattgagatataattcatattatgctttaaccattttaaacattacttttaattctagcttggctccctatgccttagttctgtttctcttttggcctcttttgcactgtccttttatgttcagccaggcggtatggaaaataaagattatagtccaagtatcttgtcaggaagaatgccattggaattcacaacaagaagtgaactcctgctttaagagatgtgccttagcctactctgaagccttagtaaatgcccctgccgttcacgacagcccaagggtattcctacacaatcacttcacaccctcttggtccctaagtaacacaaagtatgggtgatagtaaggttttggccctcataccaatgctcattgaactgtagtgtctgtctggggcattgtataggtaaattctgagaaagagccctggtattatgagaaaagtgatgttattgactttccatgtctgccatggtcttcagtgggaggaatggcctttttgatgctctgccttaccatcctggcttcccttaatcataatcattatcctcaacaaacaacacaggaaagggagacttgggggatgggagcccactcagcaggctgtctcactgagggctgcagtcttgtgacatagctccttaagaactgaatattcacctttcctatcccagtctccctaaccagatcttcagcattaggtcttgaagaatgtgcaaagttaacagtccttaaccatcctttggagttggtggactaggtgagaaggtggagccttcagtctgccaaacagctaagaaggacagcggggcagaatgaggcagagatctcatgaatagcacacgagtggctggccatgcttaacatgaaatcataaccccttaacagtagcacgaagagcccctgctagcctcagcatcttcctggttttactccaggctgaaaggaccctggttttccttctatgatttcactgaagcaattccttccctggctgtcctacctacacaaataaatactttcaagttgtttttttttttttttctttccacacagacctgtccatgagatctgagcagcccacattactgtgactgcctctgtgtttcatgatcatatttagtagttctgccttttgttatgttgagcttggggcatatttgaaagacggtggcctttttgtacacagtgtaaaatcaagaggcaaacctggaactacattgtaagccaggcttgactggcagttgggtaaggggccacaagggctgtgaaatggcagcttcatgcgaatcaagaactacatcacgtgtgtgtgatgtaaatcttttcgttgttcttctggttttcttgaaacaggttctcactctgtagcctatgatgacctggaactcattgtgtaacccgggctgacctcaaatccttataatcctccttcctcagcctcctaagtgttagattacaagcatgtgtcaacatgactggcatatgtaataaaaccattattcgcagaaaaatagttttctgaattcatcaaggtggaatcaaggtaaggctgtgtgagtaggtagatgaggtataacttcaaagagagttagtgcctcagaggacaggaagtttaatagaagtctattatatgaggtggccactaggaaacctagtgtactattgggttgcactgatagaagtgtgtagtcctgatctgaggaggtgatggtcccgttctgtcctatcctgcacagcattgtctgaaaccctgaattctttgctgtcatccttcaagagactgacaaaaagaatcgaaatcatgtcatgtgagaacagttgaaagaattgcagctgtttggcctgtggataaacagtttcagagagcacagtacatgaccaaagcttctgagtcctagatgaccaggattaggaaagaaaggttagatttcaagctacctgtgacttcacagggaagatgcaggaccattgaatgggagcatgaaggggctcctacctttctcctctttgaggtagtggctcttcagctggccagaggccaagacacctggaggacactgctctttagaaaatgccatgctctttccaaaatagtgatagagcagaaacacggctgagtgaggcggtcgtgttccagacacactgagcagtgcttggttcctgtgatgagcttttgctaatctcattatttcaaggcctgtcctccaggctccatcttttcctggcctcccgttctttctctcaacaagatgtaagcataccatctttcaccttggagtgggacttttgtgtagagttttaggcctaccctagattcctttttaagagagaaatagacttcctaagcacttgacctaccttgggaagtgggttgagagggctctagacattggttgtatactcctttatgcagggtctgaagacaggaaataggcttgactgttacaggggcagcttaacgttagtctggccagaaccaaggtgtcctggtcccaggcccagggtatttcctttacaacttgaggcctagttcagttttctacatcaagcttcatgggcctttgtggcctccaaaccaacttcattcctcaaagctattcatttctactgttcacgccagctttcttataggaccagacagctctttcacccccctgtcttcttggtacctggagaatatcctcttttaggaactcccctcatctctgactactcactcttacccattctccaaaatcaggacaactctgtttccccaggaagccttccctggctattcttgtgagctgtcaactagtcttagggcctctaacctctatctagtctagtacctggtatatatgacattctggctcaacgtgtctacttcaatgaactatgctgtcccccagtcttgttcccccagttcctcctctatctcactgccaggaagcatctactcccagggcttgatagtccagaaagaagaaactcggtcttgtgaaatggaattaagaggagacagctggcttgtttgaggatgagtaagagcagacaggagttgggggattctggggaatgagtaggtgggagccagggagcagaaacgtacatattgaagaattgtgggagtttcagggggatagatggattgaagaattcattcattattccaagaaacatcttttgagcatctgctgtgtgcaagatgctgcaccagaagtagggaatagaataatcaagaaagcaagcttggcaatccagtgggagaaacagatcctaaacaactaaagcacacaaccgaagtcacagtgaggaacaggtgagtggtagaaacacaggaaaaggagatgtgaatgagaacagtgagatgggtgtcaggtaaactgcctgtgggaacgtgctgtttggctcagaccacggactgaggatgtcctgggatgctctgacagggagtgactgcttcttgctccctggcatgtcagggactcccccagagtcccttccaagagggactttctccgtcctcttcttttacagccctaggtaagttttcagaaataggcatgaggaagggccagtgtagccctgctcccattggtagtgaaacctttaaccacactgccagttctattgtgggactgggagagctattaatagtgtggtgatatttaatatttaatgagctctgttgatgaagagctcttacctgagttctccaacactgtgtatttgtatatatcctcctagagatgggaaaggtacccaaagtcttggcgggaagagggaaggaagaatacaacctggacagcctgtctttagcatgccaggctcatgttcttggcacagaagctgaaggtgcattctgtctagggtaggcctgcctactgatggaaaaggcatcagccactagcatgcagattgcagagctcatggtaggagcctccactgagtttcctgtggtccccagagcagtccctgaagatgctagcttccagaaaacctctgctctcagctggcctgctgctcccagccctgcttagtcagaatcatgggctcagaaaggccaagcagagatcatgatgtgtggctagtggtttagagaagagggggaagaattatgtgatagcaggaagggagataagagagacagaggaaaacattggcacaagattgagccacttatcaacaacctcttcatcaacttcagacagaacctcattcagattggagcttctgagatagaataatgaggcaatctcaggaagctcccttagaaagaactggtttgagtgtctttaattatagagagaccccaagaagttattgaggggtctggccttggagcaagaggtatgctcaacagtaccaggaagtcaactgggtgtatcctactatatctttggtatgacctctggccagcctcctggcctcttccaggctacttagaaaatgaataagatcatgtacaagcagatgaactacaaattactctccttttttttgagtggggggtcctggtttaatggtgatgaaggggttggtgatttcctttccccatcagtggttcccaggggaacttttgtgggagagggtgaagaggtgtttcttctcttcaccagatggcatctatttggggctgtgttgaggccagcctagagacaaaagagctttcttctcagaggggaatcccatgagagggcaggcacaaggggagctgagaccctgccccttcccctatgccatatctgtgagtcctgttgtcatagtggcaccttcactgttgatagagggaaggccttgtcctgctgctggttcagtttacaaaggtcagtaatcgggaaacatttgaaaacccttgctcttatatcagtgggatggaggaggagacaggcccagactgttgactttgagttcttttcaacaatttgtcaagagtataaacttcaagcatacatatactaaagaagaaagtaaaatgaactctcaggcacgcatcaaacaacttcaaaaattgtcaacacaagactaatgttttgcccatgccctccccccataattctaaatagttctttttgtgtttagcatcagcatgtttctcttcctaaagtcatgtaaaacagaccataatattatcacatctaaaaataattctttaacatcataaagttttccttggtttgaaactagtccatatattgcatttagttgaccttttgttgtttatttgatttttttttttgagacagggtttctctgtgtagctttgtagatcaggctggcctcaaactcacagagatcttcctgcttctgcctccagagtgctgggattaaaggtgtgcaccaccattgcccgactttagttgacctttctttcttgcttgcttgtttatttggtttgttttttgtttgtttgtttttgctttgttttgttttaagaaagggtttctctgtgtacccctagctgcccttgaactcactttgtagaccaggctgacctcaaactcatagagatctgcctgtctctgctttctgagtgctgggattaaaggcatgcagtgtaccaccactactcagctgaccttttttttttttaattttattttattggttgtgtgtgcatggaaaccagaataactttgtggagtcagttctgtccttccatctttacttgggttctgggatcaaacccagcttgtcagacttgtgcatcctgggcttttacctggtcctagttggcgtttctttaatctatagtccttccttctacttttttttttcttgcaatttatctatttgaacatcttttgttgttgcagttttctacactctggattttgttgatcacatccctggggtgtttttaatcctgttctctctcctacatttctgtaaactagtagtagatcagattcggattcaactgtttatgaagaatgcctggtagatgcactgtgcacttctcctctcccctctgaagtgtgattgtgtccatcgtcctctgcacagttgtcccactttttgtgggttcagactgattgatggggtagttagcctgattacaacctattacagaggttctgcagcgtccgtttacctaatgttctcagcagtccctgatggtcattgccttgtgcattatttcattaggagtttcctcgtccccattagcatccccggcctctcttctttgcatctgcttttcccacactgtccttaacccgtaccatcatttctttgcctcatcaacccaagatgccctaacagcacttcaggcctggaagactccatctgcttccctggtggcctgcacttccctgaggggagggtcctgacttggatctgttctcactgaggcagctctctgaatcctgctagggccatgcctgacccacactggggagtgcaagcagcccaggctgttcctcctcctgagagttctgcagagagctggctttattcccccttcccatgactttctcaggagccctcttctgtactggggagagtcttccatactgtttcctcagcttcctgcccaagcctgggccctggcagggatccaagcctggcttcctgtttacaggcagagagagaggtgaggggggcatgggaagggcaactccagcactcatgtccctttttctctcctgccaagtttagacacctatgagggccagcgcagttaccatcctctggtactttggcatccctgtgcctctcatgatcaccactcctgttggattcttcggctcagaggagagactatggataccgtgctctgtgtattcatgcgccccagacagaaaaagcaaatgcaccactttctccatggggcagctgagcaggaagcacagagctgagagctgctgcttgcagaccctggcctacctacacaagtccaacccaacagagcttctgggtggagcaggaagccttcgaggtgtaaggggccaggggctaattatgagagccagaagacatcaggtatgctatggtggtggtcattgccaggtgcagtcaattctcagcatctgtgagggactggctctaagaccagtgcccccaccctctgccaataccaaaacccatggatatgcaagcacattacttattgatagccatggtggcatgtgctaggagtctcaaggattgcttgagtacatgagttcagtactggcctggacaacataggcagacaatgcctcaaagaaaaacaaaactgaaagcttaggataccatacacgtacactctgtacacttgaaaccctcccaaagttccgtgcaatgactaacacaatgtgcatgttatataaatagtattttgtttgttagtttgatttggtgtggttttgagacaatgtcttactatgtagccctgctagcctgtagccctgctaacctagaactcagagatctacctgcttctgcctaagtggtgggattaaaggtctgtgccaccatgctgggtataaatggctattatactatattgcttaaggaataatgagaaaaagtctggttacattgatatatgcaggactcactaattcacaggaccaaccctgtaggatttctgctaagagacaacgggggtgccttaccctcattcctccatatgcctggctcttccttgaacagtgagaacctgaagggccatattctgctccaagagaggacctgctatggattaattattttcaccactctcctggatggccccaacaagaattgtatgaaacccaatctctctcatcccattaagagagattatcagtgatctgcagtggcacacatctttgatcccaacacttgggaggccgaagtgggattatgaatccaaggccaacctaatctatatagtgaaaccttctgtctcaaaataatgaagcaaccaacagaaactggatgtggtggtgcacacttgggatccccagtaatcatgaggctgaagcaagaggattgcttcaagtttgaagtcagcccaggctgcatagtgtttcaaggtgaacctggaacatacagtaaaatcctatctgagcttcccaaactccctaaaagagcacaaagagacatagcatgtagctaggtagcagggaagcccgttatccctcacatgccaaggctcaaattctgagcagggaatggcagtgggcacctataatctcagcacttgggagatggaggcaggaggatcaggacatcaagggcattctcagctacatagtaagttcaaggccatccggcctacatgagagcctgtctgaaaacaagaagactcagatccttcagatggcctgcgaggcctcagctagtcttcctgcaacctttctgtccagctcactccttcccattgcctctaccactgactgcacgctgctttgattttcctccaggtctgcttccttttgcttcagggattttgcacatatagttttatttttggagtgttttgttctcctttgggttggctccatctcattgtctgggcttgcttctgggaccttctctccttattgcacttttcacaggtgtcatttgagaagtatatagataactgttctattgagatagggtcttatgaagtctgtgttcactaaggcagagaccatttctgtttttatgttattcctctacaaagtacctgtcacatagtagactttctgaatacctgttgagtgaatgagtgaatgaatgaaaatttcagtcttatctcctttacttagtaacctatgtcattccatcacacttaacatgtgtcctgtgttggtgaacatttaccagacatgcaacatttcacttattctttgcaactctgtaaaagaggtatcctcaatctacagagagagaactgagacctaaagtcacacagctaattgggaagccacttcaacccaggtgtgtggcctcaaagcccattctcttaaccatagtaccacactgcccccttttggcctgtcacagagttgccactgagtcctggttaatttcagcagagaggtctgtggggcccagctgtgaaaggacatgggtgatggaatttagcctggggtcatgcatctcaaggtctgtggccccatatgctttctatggaccctttgccacttccaggctgaatacagcatcttgttttagagaaaagaaaggccggctgttttaaatggcctgatctgcagtgtgcagggagtaaacaagcactgactaagattccgttaaaaataattgagagggagaaaggagcatttgtatctttgtgatgcagtcactaaaaacagcactctggaaattagctttcaggtggcattcctgggaaatgcagaccccgagagagggcagcctcttagtcttgattacagcaaagctcgcgttatccaacttcccagggcttctctggtggcagggaaattggagctgacgaatactttggactatatggggacatgcaaatgagaaataggtggcataaatataaaacccagctcccatttgttgacaggcatgctgtaaaacattctacattcattattccctccactcaaggtaacacggcacccataaaagggaagaggcattcatgaagtgacttgccaacagtaacacaacagctggccttcctgactttgaaaccagagcatcccctaaactgagtgggtggtgatagacacctggcgatggggcttcatccctatttctaggactatggttaaactagaaaaacagcaactgtataaagacttccattcactaggcattataattgttcttgagtaaatacatctaggtgtggtggtccactcctgtaatcccagaactctggagactgcggctggaggatcacaagttcaaggccagagtgagctctgtggtgagacactgccttaaaaatgaaaacaaataggtatataattttacaaggtagcattaaaatacttgctataaatataatagctgcaacatcaacatagtgaaattttaaaatgcaaataggctaggcatggcaatgcatacctttaatcccagcactcaggatgcagaggcaggagaatttctgtgagttcgaggccagcctggcctacatagggagttcagagacagccaggaatacacagagaaactgtctcaacccaccccttcaagatgtggagactgattaaatcatggaacattctttccactgcatacataggaaatcttttataaggaggaggtgagccagatgtggtagctcatgcctgtaattctagcacttgggaggccaaggcaggaggatcagaagttctgggccagccagctagatgaactgatgagctgacccaaccggtaaaggccctcgctacataatcctggtcactctggtttgatccccagagcccacaagaagatggaaggagagagcccattttacaaagtcatcctctggtgtccacatacatcatatacactaataaaaagtcagttttaatcaaaagatgtttataatctgtttttccttagcacaaagcatattacatgcccggtggtggtgctgttgctggtggtggtggtggtggtgtcggtgtcgacggccgaggtggcacacacctttaatcccagtaccggggagtctaggacaggctccaaagctacagagaaaccctgtcttgaaaaacaaaaacaaaaagcatataacagccgggcgttggtggcacacacctttaatcccagcactcaggagacagaggcaggcggatctctgtgagttcgaggccagcctggtctccaaagcgagtgccaggataggatccaaagctacagagaaaccctgtctcaaaaaaaaaaaaaaaaaaaagcatataacataaaagttgccatcataaggtgcatatgaaatatttctagtctgtgtttaaatctgtatgtataaccatacattttaaagtctgaaagtataaagtagcaacagttctaatcatatgagaactttcactttctcccttattcacctttatgttggaatctgttaagataaatcaacttactttattttttattattcctttcccctggcctatctctccctgcacagacaatagagcttttgtcccatcattcacataattctagaatcaggtattgcatggacatacctgttggctgctcatctggccagtcttgtccctgctgggcccctcagctctggcctcatacactccgttcacatctttgcacttccttctcaaattctgcagagcctctggctgtgaggagacaggcgtttctttggaaatgagaaactcaacattgaacagctatattcctgcctcttgactccctgctggcaggtttctgcagcttcaccttcagcagcaaagagaggcgaggaggagagtttagtctcacgtcccctcagctccagccatgttcttggatgttccccctcctgctggtgtttccagtgcagcctttttatgtggcaaagtagtgaaggaacagaaaacgtaattagtcctggctcgggcactacatggcaactactcagcctgatttttttttctctgcaaaattggaataaataattaacactacatctgtgtcttatgattgtcagagattacatgagaaaatgaggggaaagctttgaaaacataagttgcaataaaaacataaatgcctctatttttctgaatgtagtgttttcagatttgtgttctgctcttatgtctacatacttgcttctacatctgcttattatggaataacagtttaataggaagataagagatattgaaaaactttgaaaggctacttcctaaaaacaacctaagagggctggagagatggctcagcaattaagagcacttgactgcccttccagaggacccaggttcaattcccagatgccacatggcaactcacaactctttgtaactccagttccaggagatcctacaatgtcttttggtctctgaaggcaagcaggcatgtatgaaggcacagacaaacacacagttgaagcatgtatacataaaataaaaatattaacgcctagggaagggagaagggaagcagtgagacttgtcttctcttcatctgctctgtttccccagtggacacgctctgcttttttttttttttttttctttagttagggaaaccaatacagatttttaaatggcttaagacaatatagtcacactagaaatagtcattggaagtcactcacacagaggtcgacagctggggcaaagagaacaggggatttagaaagataagcaactgtgaaaacagcttgattggcaaatcgggaccatgttgttaaaactattgaatgtcaggccaatgagcttttaagtggtggaagccattgaagggtcttgagcaaaggactactgtgatcagtaatgtgattctcagaacagtgttttaggaataatgaaagtggatgagatggctcaggccttgacagctagctgtcctgattctaatccccagaatccatgtaaaggtggaaacaaagaaccaactccttccacatgtatgccatgggcacacacacacacacacacacacacacacacacacacacacacacacacacacacacacacacgcacgcactttttttttcatttttatttttagctttatccattttacacaaactttttttggaaaaagaataatgcataagatgacttgaagaagaaagaaagacaaaactatatgtagtcagtcatggtagtgacattgaggcttcgatggaaagaccttgagttcaaggccagtctgggctatacaggaagtcactgtctttaaattacattactgttttgtagaaagtgttatattccatttccaattggtttgacagaggtctaaatggaaagagggtgagtcagggagaaccacagtcgggtctaagagaggcagcagcttgtaagaaaataataatggcattgggttataaccccaattacaggtattaatccacactgacatacataaatggttaaataaacaaaggagaagggacaaatactccttttagaagaattctaattatatatgtacatatataatttcataaaatataattaattaaagttttatatttgtagaaaatgagagaaataaaaattacaactgaaacatcatagtaacaatagctgctgttatgattcactgactgctaaatctagagggtgacactttaagcagatccaagatatttgaatagttatatgacatgcttatgtattaattactgttgtagttttaaacatgtatctatcctcactttctttgatactcctctctctaggagatggaatctaattctcttccccttgaatatgggctggactaagtgacttgtttctgataaagagaaaacagtatgacagaaatagtaatttcacaatagagagacctgtcaagtgccactctaagtgatgaagattaatcccactggcagtgagacctgtaactcccagtgtgccatcacaagcacatacacctccagtgtattctcccccacaatttatataacctgaactagctacaagaacccttaggcaggggctggagaaatgactcagcaattaagatgagttaactgaggacccagattgaattccaagcccctacatggtggcttatagccatctataactccagttcaaagggctccatcgccatcttctggcctcctcgggtactgcatgctcattatgcacatacatacagtcagacataaaggaataaaataaagcaaagttttaaaatgaaacattaggcaaacgaaaaagacattctaggaaatgcttgaccaggcattttcttgatctcaaaaatcaagaaaaggatcctagtataaaaactgtagaaatttacatcaactgtgtagtttagttaatagcaatgttctagtattaacttcttagagttgatcatgtaccatagttaaataagatgttaccattaggggaaactagatgaagaactgtctgaattaccccagagtgtaagtatagcattgtttcagggctggtaaagatggctcagcaggggaaggcacctgttgccaaacccaataaactgagtttgaccccccaggatttacacaatagaaggagagaaccaacttctggaagtggtcctctgacttccacatgatcactgtagcacactgcccactcccataaacaaataaatgtaattttacaagattttaattatttcaaaatgattaaatttaaaaatatccccaccacctgtgtgtgtgtgtgtgtgtgtgtgtgtgtgtgtgtgtgtatgtatgtgtatgtttatgtgtgtttagtgtgttttcctagaagactgctgttaacaagataaggacagctgaaaggaaaaatgaagactatatgtagcaagctccaggccaaaatgggttacacagtccattaaacaaaaactgcgggcgttggtggcgcacacctttaatcccaacactcaggaggcagaggcaggtggatctctgtgagttcaaggccagcctggtctccagagtgagtgccaggataggctccaaagccacagagaaaccctgtctggggaggggggaactgaaaagaaaatagagtttccaaaaatatctaatcagcacttccaatgattctgaaactgaggaacagtcacctaggaaaaggccactgcagcaaagtacgctgagaagttccttcctcctggtgtgtggtgtctgcagacagcagcctggttgggagtgtacacagcctgttgcctatggggttgccctaagggaccttaaagacagtttcctgtggcctagtcatgcatctggtctcaatgcttttcctgtatgtaggcttcaggcagtgatgtggatgcctttggggaggcccagggcacagtggcctgggttcacattggccaggtcatcatgtctgtcctcaccaaactgcagaataaggagcatgtgaccgaagccctgcttcaggtttaatcgagatgagcttgaagagatactacttgaaaaacagctcatccctaatactgtggagtcgagtatattccaagttgtggtcccctagacaaggggcaggccctgtactcccaaggaattcattgtactgccctataccctcccaaatcatgttcagtaataaatctcacttcttgtgggcatttggataaagggccactggatttttaacaaggaccttggcactggccccaagagttagcagaggggctagggagatgacttaaaacatatgcttatggaggacctgagtttgtttcccaccacccacatcaggcacctctcaactgcttataatgccagctccaaggagatgcaggacctcttgcctgcagcctccataggcacctgcacttgcatgtacacacacacacacacacacacacacacacacacacacgtataactaaagatgagagaagacaagaaggaatggagagtgtacacacgagtcaaggtgccaggactcagtgcagaaacccttgccaacactaggcaaatagactaatagaagaggctcctagggagccaagcatggcggcacatcccagcactcagaaggcagaggctgatcttgagtttgaagtcagcctggtctacagagcaagttccaggacagccagggctacatagaggggaaaaaatctcctaggggaaggaggaatggatactcataaacaaagagacaagcaatgatgtccagagcaataagcccaagggctgagcccaaagtgcaagaagaaatgcctttgaccaaaaagatgcctctgccacctatctgtagccaaactcaggctaaaagctagaggccagtggggcagtggtggcacacacctttagtcccagcacttgggaggcagaggcagaggcaggaggatctctgtgagttnnnnnnnnnnnnnnnnnnnnnnnnnnnnnnnnnnnnnnnnnnnnnnnnnnnnnnnnnnnnnnnnnnnnnnnnnnnnnctgttaaaaacaacaaaaaagaaaaaaaaaaaaaaaaaaaaaaaaaaagctgaaggtcgtgtggctgtgcattaaggactgtttctttcactccttagctgagatgctactctgtttcccaagtcccaggttatcccctgtggactagaaagtcagactggacagaaaatgaaacaagctggatttatccatttgctgtgcaggttgtatttgagatggagattttttttttgtaatggacagcattgcagagtagtttctctgtgaacatgcatgtgtgtgataaatgcacacctaccatgaacatgttttgtcgactgcttaccatgtggcagagactggtaaacacattatatcatctcagttaaccgtccccacaaccttctgagacaggtaggtgctataatgttcctcatgataaaggtgaaaatggagagccagagaggttagaaaattggtgaagttcacataagtgggacttggatagatgcagctcagtgcagagaaactgccagcctgcactgaggccctggcttcaaccccttctatggagaaaaccacacagatacataaatggcaaaaataggactcaattcaaaatcatttgttttaagcatcacgctatactccctactcctgctctagtgcactcatgcacacgtgggagtgcacgcgcacacatacacacacacacacacgcacacgcacacgcacacgcacacgcacacgcacactcacagactgtaccaggagactaacagtgggtataccgctctagaccagtggttctcaaccttcctaaagctgcaacccttcaatacagtccatcatgctgtggtgacccccagccataaaattacttttgttactacttcataactatgattttgctactgtcatgaattaaaattcctgtgttttccaatggtcttaagccctgtgaaagggtcatttgaccccaaagggcttgagacccacaggttaagaatcactgttttagatggggaggttaaatgnnnnnnnnnnnnnnnnnnnnnnnnnnnnnnnnnnnnnnnnnnnnnnnnnnnnnnnnnnnnnnnnnnnnnnnnnnnnnnnnnnnnnnnnnnnnnnnnnnnnnnnnnnnnnnnnnnnnnnnnnnnnnnnnnnnnnnnnnnnnnnnnnnnnnnnnnnnnnnnnnnnnnnnnnnnnnnnnnnnnnnnnnnnnnnnnnnnnnnnnnnnnnnnnnnnnnnnnnnnnnnnnnnnnnnnnnnnnnnnnnnnnnnnnnnnnnnnnnnnntggaggagagagtgaggagtggagcaaatgattaccacacaaagaattttctccctgtcttaaggccaccttgtccttggacaaggtttgtttgatcctgaactttcagagagactggggacattttttttatatatatacatacatgctaagattctgaatcttagcacttattgaaaatctggccagagagtcaagcctctggcgtgaagcccaggctgcagccatgagtgactggaatcattctggagctgcttcaagggtgcaagccatggacccaagcaggcagctggtgtcagctgttggcaaagatgaaccggtggcatttaaggtcacctctagtagcatgcaggcctagtccagatccgcccacgtgttcaggggtggtgattcagaacgctggatagctcccagaggagtcctgcctctccagtcaagactggagaccctgcagattcactttgtttgtttagacttttttgagacagggtttctccctgtcgtcctggctgtcctagatctcactctgtagaccaggctggcctctgtcccctgagtggtatacccacattattaaggccctgtgtttactcaaatttgaatagccttcttcaacatgtctcccacctcaagggcctggcctcttctctttcaaagactatccctgtgagtgcaaaggctctctgtctcagcacctttcctaccctcccttgactgaactctcttgaagtcaccattcctctcaaagtaaagtaagttttagagacatcatgccatctcctgcgttgtgctgtccatggccagaatctgacaccaaagtacctcaaggctttgtctcttaacatccctggtaccttcctctttaagcagagaatgagggaagaccattaagagaggacactaagaatatttcaaagcctgacagaagagcctgcaatggctaccactgtaacttcagccaggcaatctgttcaaacacatctgtttaaagacttggtttgggcggggcattggtggcgcacgcctttaatcccagcactcaggaggcagaggcaggggggtctctgtaaattccaggccagcctggtctccagagctagtgctaggataggctccaaagctacacagagaaaccctgtctcaaaacaaacaaacaaacaaacaaagacttggcttggggaggtgggtattgacatagatgggaggagcacatctagcaagtagacgcagaaatgaaacaagtgggtctgggaactccctgactgcccacccctactcttgcatgcaagtggcccctgagcccacaggtagaactttgagcaccattaggggaagggttcgtctcccatgctccaagtgacactgtgggagtatgagggtgcgaaagggcagcagagtctcaaccacttacaggacttggattttgtagtggaaagttctcctgcctccagatctctcccacagccaagtgaatgagccagcaaaggaggtaagagcataaatccacctggatgggaacaagcaaagatgcttaaggagcccttcctcccaaccagtcacgctctggccctgtgcaagaccctttcttcctgagaccttgttttcctcaacactttcaggttcctggatcttttagtgagggaactgttataccccacggtcactgcctaacttatacctcagtgaacgtgctggtcaaagaaactgtcctaattactgacatagtatgccctacccaacagccaagcacatgcagactggcttacactcccaaaccaaccagccacagcaggacagggaggttcggggaagagcatttgctgtttactgagatgttagtggacctgatggaatttaggctgaaatgactaaagctgctgtcaccccaattgaagtgcttttaggtagcactcctgcagatagaacccctggcaatgtagtaattgataattggtaaaaagaaaagcgttcagtggccctggacttgggctgtcccctcaattaccccatcttgcttttggaaacagcacattccagtttccaagaggctcttaccgtgaggctaagcacaggctctttcaacaagtattcatagagaagaaacaagaacagatgaggactttgcccgatcccaagagatttgtttgtattggtttttgttcaagtagaacaatcctaacctcagccagagcttgctctccatctgttctcaggggcaaaggcgcccctgtgttttccttcctcatggtggatgctctgtactcattgttttctttaggagctgtgattatgtgaacataaaccttactaaattgaatacaaccctgagcattcagaagaaacagtgcaggactccagggagagagcagctgtctggaaagaagggcccatgaattctaaccccaaggctgccatctggcattgacctgggacaactcatttactctgccctggggctctttctagaattccaggctagaagccaagcaggcctgggctgtcagggggtgaagagacctcagttggtgctgttcacagcatgctgaaacccacggccagaggatgtgcactgtcctggagatttcttgaagttttctatttagcctttctgtcctagtgctgaactcccaagaggtccctgcctggctgatgcacatagttgtgatcctgggttacccaaaagcacttttgaagtaatgacttagatggggctgagaatggtggttggctatggagctcttgttccactcttccctgctatactttggtgtcactagcctcattccccaaggggcacctcggtagctcccacctcatattgctcttctcagatttttcatcctcagcctcgactgattccttgtccctaagatgtttcccacggaagccaggctaggttggacatatctgtaacacacacttacacttaagtgcatgaagaaaagaggaggtgagccgagacccactcaacctgtagtgtatgctcctagggcagtgcctgttcagcacagcacagcagagtgtggaagagccctagtcctagcttgggaagcatttgagtggagtgggcctccatagcagcacagctctgaggaaggaaggaaggaggtaagacattatcaggcacttaacttcctgcaaatcctctctgcatggttttccatcgctttgaactgtttattaacacacaacagaagccattttgctatttagatggctcctctgggaactccatgccactcccaccccctcctgaggtggattgaaaaaaacatcagctttcaagattttatacttgaatttcagaaactaaattacattactacatacggtgagacagcgccatggcctgttcctatctgtgtgctccaggcatggcaaggctgataacatcagtgtgtcaaagcagctcgatccacacaatttgcagccggctggagctgggccagaagtaatcagagtgggggtgcaaaactctcagaatctggagcaccccagggtctactgtaggtaggcacagggatttggggttctttccataaattatcatttcttctacctgtaaagagagaagttgtcttaatgaacctaagtgtaacaagctgaaattactctctgaaacactgaatcacacaaaagcactagtaacagtacgctcagacggttttctctggggtcaagatggacaggagaaaggagagagtggaaaccataatatgtaaagatatgcccctcaggtctaatatttatttctacatttttattttatgtatacgaatgagtacctgtgtgtgcctgtgtaccacaggtatgcagtgcccatgaaggccagagaggacttcaaatctcctagaactggagttacaaatagctgtgtgtcctctggaggtggggagtgggggcaggaatcaggcagtgctctaaccactgagcaatctcttcaacctgtttttgtggtatttttgagacggggtctcactctgtagcctaggcttctgacctcctgtgtcagcctctccaatgccagggttccaggtactgggcaccacacatttgtatgtttaaaaaccaaagtactcctggaaataaatattctgtgcctccttcaagtccagctgtgaaggtctcataaccagagttctcactaaaatcaggttgtagagtggacagagaggaagtattgcttccctgccagggaacatagtaacttgtagagtctccttcctaattgtaaccaacatttaattctcaagcattcctctcatagcagaaagtcttcagattattgagttattccaatgcatcaaatgtcataatatattcagtcagcttgggaagcatttacagcccaatttttataaatagcaaaaacaagctgttcatgtccaaaacatgattgtttccccagatgcatttgctccccagggtcaaggtttgggaagaaattcagcctcagtgaagttgccagtcctctgccatagctcaagtccacctccctcaccctagtgtctcctcaccctagtgtctccccgcaccctagtgtctcctcaccctagtgtctccccaccctagtgtcccctcaccctagtgtcccctcaccctagtgtcccctcaccctagtgtctcctcaccctagtgtctcnnnnnnnnnnnnnnnnnnnnnnnnnnnnnnnnnnnnnnnnnnnnnnnnnnnnnnnnnnnnnnnnnnnnnnnnnnnnnnnnnnnnnnnnnnnnnnnnnnnnnnnnnnnnnnnnnnnnnnnnnnnnnnnnnnnnnnnnnnnnnnnnnnnnnnnnnnnnnnnnnnnnnnnnnnnnnnnnnnnnnnnnnnnnnnnnnnnnnnnnnnnnnnnnnnnnnnnnnnnnnntgtctcccctcaccctagtgtcttcccaccctagagtctctcctcaccctagtgtctccccaccctagtgtctccccaccctagtgtctcctcaccctagagtctctcctcaccctagtgtctcctcaccctagtgtctctcctcaccctagtgtctctcctcaccctagtatcccctcaccctagtatcccctcaccctagtgtctcctcaccctagtgtctctcctcaccctagtctctcctcatcctagagtctctcctcaccctagagtctctcctcaccctagagtctctcctcaccctagagtctctcctcaccctagagtctctcctcaccctagagtctctcctcaccctagtgtctcctcaccctagagtctctcctcaccctagtgtctcctcaccctagagtctttcctcaccctagtgtcccctcaccctagagtctctcctcaccctagtgtctcctcaccctagtgtctcccctcaccctagtgtctccccacccccgagtctctcccccccccactctcctcatcctagagtctctcctcaccctagtgtctcctcaccctagtgtctcctcaccctagtgtctcctcatcctagtgtcccttcaccctagtgtctcctcaccccagtgtctcctcaccctactgtcccctcaccctagagtctctcctcaccctagtctctcctcaccctagtgtctcccctcaccctagtgtctcctcaccctagtgtctcccctcaccctgctgccttcccactcactcttggattcagtgtctagataaagaatcggaagggcaaagctttagctgcatgatctaaatttaaatttctctggccatagtggggaaatgttgcttactgactccatctctgcctctgaagacaaattaataaagtcatgattttttttacatttgtttgttgtttgttttatgcttacagaagggtaatgttgaaggagttaaaagtaagaaattatgataaccacataccacagcataggtttccagactgagcctccctgtgcttgtttataattgctggagcaggtgctccaagttactgactgtttctatgtctgtcctggcttcccaggatactctgaagtctgtactggccacctgtctcaagaactacaagttcagaccgttgctgactgctttttgatgtagcctggggagcatggcacaaggctatcaggcgactgtggtacatccagaattgagtcaaatgcccaccccaccacttgctcttacctttagattggccagagcctgctcagcctcccttgccttcctaagaaacagcagaacctgccatggttgaacatgcctcctgaagggcatcaccctgggaaacttcaagccttgcagggctcaggtccataattattgagactgaaataaagtttttgtgaaatgtcagcaagcctgagaatggtgtgttgtgatttctctctctggacatcttcagacaatcgaccctcctctttaccagtctctcctgtcattatggcaaaaagccctccccgcagaactctggctctggctcctgtctcccattattcttctcagacatccttgtcaccagcccctccctggtccatcccttgtgtgttgatgttcttctgattgcttttttttttccctctagccttacaaatgttaaacaagcacaccctcctgcatagtcatcaaaacgacctctgtttctgtcttctcatcctgtagcattataattctcttagtcactggtaatccttgcatagctcttcaccctcatcctcacatctaccacgtctataagcccagcagcttccctccaccctctctaaccttctttaatctatggatatgccttgctcaggctcttccattttctgattcctcttctctagtctccctgcctccagctcagccaccctcacactgctctgtccatgtcagtctgacagaaccgaatgatccctttaacccacttttcatccctttcactaccttaccctgtgctgccttctgcttttctgccctgggctccatcccctatgccttttccttgtgtactgcaccccccacacacaccttgaggtattgactgctttgatggaggcaatgttttcttcctgaagagagttcattcagcaggaacttagtgatgaaaaagcatccaatgtcatctaagaagagcttcaggtggaggttgagcctaaaagacccgattggactaggtgccagccttccaggtgatgactttggaagacaagtcccactgccctgtaagttctgacatggcattaatcttgtaatcttatctgattgctctggaggcaaagactgaagtatgaaaaaatgaacaaattaggttcaagtcaccttcaaggtatgactttgagcactttttacaacctgatacttcacttttaaaataggaatgataggtcttactcggttcgggattaaatgagatacaggtaaagcctccagcaccgtggctgtacatacagccatatggtagtaatagtaactaaagaatgcattggcttctggaagaaccgtgcctgagacaaatcgttctgaacaactctgtacatggcctggccagaaagctgcctccccaatacaaacttacatggcccctctgcctgctctgtaaatgattgtcccctcttaccactaggaatgtagccagggtaagatagggatacaggaatctttaggagacagtctggagatagtgcgtgtttgggaggcctgacctagagccctgccattcaaaggcaaaacccctgtactaacattgccattacctgggtctgggatgaaatgtggaccctgggctgcagtccatggttactgaatcaaactctgcatctcaccgattcccagatgatctgtgcacatgatgttactggcctaggataacagggatgtggactgaggactgagaccagggcaaaagcatcctctgaggtgtggttaactgtacagagggttagggactgcacatgttgtttttctttcatgatcccttccctatgggtgccttgggcatgaggttgtacccccttaaattattcactcagtgtcacaacatcagccagggaatgatggtgagccagaataagctacaatcctccttgaatctgaggagaccccgggacaaacaatctaagtggaagttgttttccttgagagatgcatagctaactaccaatatgtaactctggctgtcctggcactcgctctgtagaccaggacagccttgaactgcccctgcctcctgagtgctgggattaaaggggtgcaccaccatgcctggctcttatcccatctctaaattattgttggtgggaatatagagctcagtgtagagagcttacctagcatgtccaaggccctgagtttgattcccagaaccaccaaacacaggatagcagagacgggagggagagaggagagaaaagaatgaacagaaagaaatgaataagtcaataaatcatcttcatggcaaaaaccagggctcagtcttgtcaacccagcagaccgcacggcctatcccttgctgttgtttgcaaacattcttaagcagtcattgaaatgagggattaataataataataataataataataataatagagcatttggccaaagttaccctttagagctgtaagatgtctttatgagcaaaagacggaacctacctgccagatgtagtgagctttaaaagtcagacaggcgtagaggaaagcaagggctgggctaggaggcaccacaggagaacccattgatcccatgcttccactttactgtctattgcagacaagcagctccttattcttccagtgttgcaggggcggcagggagctgctctgggcaggcatcccatggattctgccagattattacttttagtccttggaagtcagaacaagattcatgaacagagcaggccagactcagttcttaaataactgaaccatatgaagcaagatgatacatgcttataatctcatacccatgaagctgaggcagcaggatcactaggagtgcaaggccaagtcttgcacaacaagacactgtcaaggaggaggaagaggaggagaaggaaaagaaagatagtcaacaacgacagcaaatcctgtttagggttggggatttagctcggtggtagaatgcttgctgggaccctggattcagtcttcagctctggcaaatgaatgaatgaatgaatgaatgaatgaatgaatgaatgatcccctttagtgagatttaggaccaagctccacgtgaggatcctcaagtgactctgcccagacacatgccagtgtctgctggcatttctcttgctttagcttcactaccaccagtctctgggcagtgtcttctgtgtgtcctcttgccttaccttgaagaaccagaacccacatcctggaatgagatggaaagatactctcatctccaaaccccaagtcccctccagctctcttggggcttagaatcatttcccttctatgaaaaatttcattcccccaaaagtctgtgttggttgaatctgaattttaaaaagaggagagattatttattcctttactgcccactctgacaccaccttctcctgcatgggtcgtgctggtgacatgcatttgtaagtgtacatactataacgtttaccattttaacccattgttgatttggtttttgttttttgtttttgtttttgttttttgtttgtttgtttttgagacagggtttctctgtattgttttggagcctatcctgccactcgctctggagacaggctggccttgaactcacagagatccacctgcctctgcctcccgagtgctggtattaaaggcgtgcgccaccaccgtccagctgttgatcttttttaagggactttgtgcctatacttgtttaattaaatgaggtaacctttccctatagaggttgaaatggggggggggataaacggaattcaaagaccttgtagatcagaagagagcataagctggtccagggcaaggagggagcctccttaatatgtggtcagggctaagccaaaccaggtttcccagaaggaactaagaactctaagcacccggccttacctcctggcctttattccctggcttcccccaaaccaaaactgctgaactcaagcatttgtctcatctcccaaacaaggactcttaagtcccaggttgcatgatccctcccccccagacataaatgtctgtacacccagctagagaaggcactgacacgacaaaatccaacttggtgaaccagggcctttattgggattccaggaacacaggtgagtcccaggctgctgcactgaggcatcccatttcattaaactcagctgtgcagactggtgattggaatcttgggaatggggttatagggaggcactgggaaggataagggcctgatgtgcaccataactcccttctccctccatgaggaattattactagactccaatctctcttgtgggtcttgtgaaggtcgtcacagatgctctgagatggtgatgctcatgtccaagctgcagggaacagcttcactccagtagggagaatgagtatctgagaatctggaaggtgtacagcctaactatgaaaaataggatgctagatctttaaaatacactggctggctgaagaggtggctcagcaggttaagtgcttgctacacaggcataagatcctgagtttgcatctccagcatccacatgaatgacaaccgggcctgtaatgccaccacttgggagtggaaacaagcaactcccagcaaaaagtggctacctaaactagctgaattggtgagctgtggtttcaaccaaagaaccttcctcaatgtataaggtggaaagtgatcacctgttgtcaacttctagtgtccacatgtatgtgcacacatgtgtaccacacctacatacatttgtgtgcccacacagaaacatccatgcatggaaagcatacacacaaaaataaacaaaagtaaatcccctggccccagactttgtttttctttcaagggtctaccctagctgaaaactaatatgtaaaaaacctaagcatggtaatgcatggctgtaattcaagtacttggtaggggaaggcatgaccatcagaagttcaaggccattctcagcagcacagtgagtttgaggccagcatgggctgcaggaaccctgtcttaaaaaatgaggaaagaaagaagggagcttgaaaagtggctcagtggttaagagcactggttgttcttccagaggactaaggtctggttcccagacccacacagctgctcacaaccatctgttattctagttccagggcattggttgccctcttccagcctccctaggcaccaggcatatatgtggtacacagacactcatccatactcataatttttttaatttagaagaagcaaaaagggagaatgaggcagatgagatgactcagtgggtaaaggtgcgtgtggcatgagccctatgacctgagtttaatcctcagagcccacataaaggtgaaaagagaaacaattccacagagttgtcttctggcccccatgtgtgtgcactcacacattatacacatatgtaggaactgccacacaagcttaaataacttcctggtcagtctgcttagctctcctggccacaatctgaaagcaaaggagacactttgtgaggagatgctttgtgaggttggcctcgtggctctgctatttccatggttcccatagctggcttgctgagacaagcaaggacccaataagcatggttctacaaccagctactgagcagtactggtgatccacttaggcctccccaaacttgagtgtgacaaagctgtcccacttgttccccaatggcagcctcaagtcaggaagattttatctggtgggtgatctcaggggaaattctattccttgaaagagggtttcccagaggaaagcaggaaaatgagagctggagctctctgaagatgatggataggcttggtggcctggaattccctgacacacagtgtgaaataaaatattaaaatccaaccatattctcactcatgatgaggagcactgtaaattggaagaatcctttggggaaatggtttgtaatatatgtatcaagaatcttaaaaacattcatgcttttgattttgtaattttactttatttatgaaatggttccaaatggattgtagtgtgacatcatttgcaatagtgaaaaattgcaaacatcctgaatgtcaacctaaaaaattacaaagttattgtacctctccctggggatatttatgcagctattaaactgatagcagcaaaggcaattttagagtatggagcactaattatgttgtggtactaatttgtgtgtattgtatatatatgtgtacatgtagatctggatgcatgcatgactgagcatgtggatgctagaggttgatgtcaggtttcctctgtcactctggacacactggacctggagcccccagaaccccactatcttcccttctcagagctcagttgtaagcatgtgctgccatgggttgcttttcatgtgggtattggggatccaactttaggttcttatacttacacagcaagtgggcgcttcacctgtggggccatctccagcccccagatactaattgttaaaaatacagaataagccaggtatggcagcacatgccagtaatcctagcatgttgttgatagacatgggtagatcgtggatttgaggccagtctgggatacagagtaaggttcaggctagtctaagctacatagcaagagcctgtctcaataaaccaataaccaaaataaaataacagacagaataggcctggcacgagcagtggtggctcacgcctttaatcccagcactcaggaggcagaggcaggcagatctcttggggtcagcagcactctcctcattttggttctccaaatgacagatatcataaatactaaggcctgggcctacaagatggctgagctggtaaaggtactcgctaccaagctggatggcctgaggttaattcccaggacccataaggtagaagagaactgactcctgcaagcccatcctctgacctgagcggagtgtgtgtgtgtgtgtgtgtgtgtgtgtgtgtgtgtgtgtgtgtgtgtgtgtaacagggcagggagagaaaagagagagagagattttaaagataccaaggttttctagtgcttgtgtctggtagtggactgggtagttgaaagagacagtgtgcatagtggcacatgcctgtagtctcactacttggaaggctgaggtagaatgatcattgtgtatttgaagccaggctgctgggatacacagcaataccaagccagttagacctacttatctagaacctgtctcaaaaaacaaacaaacaaaaaacaaaaagctgagcttggtggtgcatgcctttaaatcccacaaactctgtgagtttgagcccagcctggtctacatagcaagttccaggacagccagggccacacagagaaaccctacccccacccaaaaaaaaggaaaaagaaagaaaacaaaacaaaagcccacctcttacttacatgaccaacctgagttcctagacctcagatctgacatgagactctgtgagagcagatgagcatgcatacatgcaggtgtgtgtttgaatgcacatgtgtctttaccctctccccccagcactctgcacaagtgcagtatgcacttttttctgcatgcccaccagcgtgtagcccagcacctgacagtggacaatgtgttgatgtcgtttgaattgagtgctttataagaggaaaaacacaggaggctggacacttgtactagtaagagaagcctccctgagtcagggactctctgccctcacagcagacttaggctttataagcatccagcctttctgttcccctgatctttgtaagagccccaaacattggagaccgtcctcctttccctgatttcccctccagctcttcttcagagaccttacctcacaaaaagtctgtctttccctgtaaatgggacctcccaaagaccttcctgtgtcccatccagttgcttagctctgaggggagatagggaacaaaaacaagagataaggcttctagaaatgggcactctgtaaagctaatgtggtgttttgttttgttttgttttgtttttctagctttccctcctaaacatctcttaatattgctggtactacccactgccaagagttgtctgggtggacaggtgcagacctgaacaagaggactaaagccacaggtagctgttgagctactctctgaacaaattgtgacaaagacagagctggctctctcccatcaatacacctatctgtcagagagagtggcctgagccaaggcctcccctgattttctatttcttctcagcattatctctgctgaccccggtgtcctgatattttgtctctcttcctttctgatttcacccagggatacgtgactctattccaaaggcagccatttagcattcccaactcagagcctccttctccagctccctctaaagctggaggaaaattcgttatgtgctttgtgaagagaggtcagatgctgttgctgtgtgcatcttcacccttcattgtaagtccagtttggttcccttcttcctgagaattgctgcttagagatgaaagcagaggttccattcccctggggggaaactaaagttaagtatttcctctacctgaaccaaccacactcagttcacaaaacatgcacagcgtgttcagcacctcggagagcacctttcatccccgaggcgggattactgctgaaaggtgaagnnnnnnnnnncccctgggaccacctgccacttccttcccttggtgctcacctctttcttttccttgcaaggcctttggaatgaactccctccattctccactgaccccaaattatctgcatctccccacagcagcacccctggcctttctgtaaagagcttccctggctttctattctagactcctcactatgccccattacaatctctttttagatacccaactcttcccttttactataggacagtggctgtgtgtcccccagccctaaagaaatcctacaaatttgaagttgtcatcctttcttgtttcttcctcctcccgtgaagctccttgaaatatcttctacccactgcctcaacttcccagtgttctgcttgctccaaaacccttgtaacctgatctctaatcctgtccttcaactaataccacgcccagggctgtctaggacatcctttttttctaaatttcatctttcccaggtggactgagcttctcttcgggacacttggaacttcacagcttcccacttgttttcctacctcatcccactgctccaactcagtctctttccacatgttccctgaaagttgtctgctccttgaggctccatcttgtattctttttgttgttgttgttttttcgagataggatttctctgtgtagctttggagcctatcctggcactcgctctggagaccaggctggcctcgaacttacagcgatccgcctgcctctgcctcccgagtgctgggattaaagcactggcccatcttggattcttatcttctgcattctgtctatttctctaggaagatttatcctcccctaaacttcagtcatgaccagcctacaccttctccctggttcccgaactccaaatcctactgactagtgatgtcatctgtttccccccaaaacacccccaaacaacatatctccaaatgaactaacctggttttccctggacgtgccctccctctcctgcatttctgagttaatagcatttttctacataaacacttcctcatacactttggtcttcagagtatacttgtcttctgcttctgtctttcctttgtacacattgtctttacccccaatcccattccctcaacacatctcccacatagctgtagtaaagggttctttatctcaaatatgttcatgttactcctgtgcttaagttttaagtgtttcccccattatcttctaagggaaaaaaaaaaacaaaatcaagagccaccttccactatgatgtgagcaccccatctttacttctgccttctaggcttcagttataacaaacctggctgttcctagaaagtactttgccagctgcagccttctgaacttttgcaaatgttcctaaatgttcttcccaggaactgccaagctgttattttgaggtcactcccatttctccctttgtcctgttccttcttcctgtatgaggcaaggtctcaatatgtagccccgattggcctggaattcactgtgtagataagactggcctggaactcatagacacctgcctccctgggctggtgttaaaagtatgtgccaccacactcaactcattttaccttgattgatagctataggacactccttgaaaatgggcatattttctatttatctctatgatacctggactagtgttgtaatgaataaggaaaatgtaacatggtggaagaagacagaatgcttcctagtcagaccctagtcagatccacagggttggggatagagtccttcccacagatagctccacatataagccacatctcagcctgtgtggtgccagagatgcagctgtagactactggacactcccagggcacactgagcttatacatataacatctttatagttaatacaggtgcaatggtcagcatttactatagtaagtggcaaaccctcacacgtgcctttgatacacacattaatatccatttctatttatacttgaataaaccaaatcacaccactagtaaatggctgagctgggatctgagctcagggacactgcctttagagtcttggtatgtgtgtgtgtgtgtgtgagagagagagagagagagagagagagagagagagagaggagagagagagagagagagagagactcagagactcagagagagtagacacatgctatatatatatatatatacatacatgaatacatgtggaggacagaggacaacttttgggagatggttctctccttccactgtggtttccaagaattgaactcaggttgtctgaatttcttggctagcacttttgcctgctaaaccatctcactagccccatagcttataccttttgccaccacagtatccttttcagtctgtgtggcaaggggtgggactgactgggttgtcttcctttcaaatgtggatacaaatgtggaagtttgcagcaggctgatgtgtggccccacagaagaagcagcctcccagaggaccatctcttttccaagtctcactcagtctttccttagcattttcctttcaagcaaggccattggtcagctcctcttaggacccatgtgtcctttatgtgtttgttcatttattgtggggaaagaagatggcactggatcccttggagctagagttacaggtggttatgaactgcctgacatggatactgacagctgaacataggtcctctgcatcactgagccatctccctagcccaagcttcctttttgtttgtttttttttggggggaggggtagtgaaagtgtttgatctttttgtttttattttttcgtttttgttttgtttttgatacacggtttctgtgtagccctggctatcctggaacttgttctgtaggccaggctggccttgaactcagagatcttcctgcctctgtctcccgattaaaggagtgtgctactagctcagttttccttattttaaaaaacaaataattgtgccaggcagtggtggtgcacgcctttattcccagcactcaggaggcagaggcaggtggatctctgtgagttcaaggccagcctggtctacaagagctagttccaggacaacctccaaagcaatacagagaaaccctgtcttgaaaaaccaaagaccaaaacaaaagaaaaaacacaaagtattgatagagggtaggagatggctcatgggcaaaatgtttgctgtgcaagcacatgtacctgagttcagattcccagcactcatgtgagctgagcatgaatgacagtatgtactcataacaccggtgctggggaaacaggcagctctctggggccaggtggccagctaagctagcctaattgcagggctcaagatttggtgagaaagcaatagaaacatggatgaacatggctccttcagcctctctacatacacaagcataagacagtgcaccctcacacacacatgcacagataggtacccaggatctcaccagcgtgttttctgtactttctataaagcatcttaaaagactaggctggagtaaatcagtgagttttcacattttattttattatatttatttgtgaggggtggggaggtgctgcagtgcacatatggaggtcagagaacaacttgctggagttggttgttttcttccaccatgtgggtcccagggattgtcagccttggtggcaagcaccttcacctactgagccaatctcccagggctgtagttagtggtctttttcttaagcaacaaaacgcttttgctaacctgaattttacagaaaggttaatatagaagtgaactaacaatggctttctttgattgaagggaacccaagaccctgtagctaccattcctacacatacgccccacttacatttcagccccacccaaagcatggggtttggggaatacaagttaatgaaaattgctggtccacactgacgctaaggatgcttttggctcttttgcttcctctggctgttttgatgtggtgctggtcattagcctatagcccgggctattaatcttctctgcagcctttggaggatttgtttgaatggttgtagagacatggattgttgttagagatgtatttcaaggtctgtctctgctgagtgtttattaataatcttgttaatccctgctctagttcccagatctagctaacgcctgtcggaagtcctcggggggcattttaaattctctctgattcttggagccagacgcttccttctgcccgagtcctctctgctacttctgctcatgaatattttacatttaatctccacacaatggtcatggtgcactgcctgcctttctcagagaagacactcagaaagtctacagtgtttgatggcactgtgccaaagacctttgtagttgccgcttgaatggccttctaccgtggacggtgaccaaggagctgcggaatgggggcgtttggcatggagcctctcagcccaagctttgatctatggtttcactcaggatcaaacactagcaggaactgccagtgggtcttgagagctgttaatggggccactggccagagttgctcaacggctccccagccctcatcctaggttttctccctctgagttttctacctgacatgttaccactgacacctatctgcccaggggcactatgcctcagccccggttgcctggggtttgtgttctctaaaatcaaccttagggaaaagacagtgagactaagcactcatgtgacaggtagagtagagagggttaggagcaggaacatgatttaaaggccacagtttaaaagtcatcaggataaaatgtcaatccaggctgcaggaggcatcgtttcagaagggtgtggccctgcggaggagactgagagatgcagatagacacagaaatgatcagaggcaaaagatggatcctgaggaagccaagtgcatgtgcagtgtgttttacctgacaaataaacattacagaatgtaatggatgaagcagtgtgactgatgagcctagaaacggactagatcctccctggtatggcgccaccagcatgtttacagggttttccatctgaaaatccttccctttggatgtcttggggggtgagctcaccctgtggcccaagagtaatgtcagagtccagccgtcaagtctctgtctaccctgtgggtagtaagtgagaggccactggggcctcagcatggataagggccatgcaggccagcttctccaaggtacagtttgaaagcagtgtcccagggaactctgtaaagtggggaggatgagattgggaagctttgccacttgggaagttatctgagatgtgggtgcttctgagatgcaggcagggctacctcccacctgtctccctctcacattgcccatggctaaggggtggggactgagacagagggaggtccaggctcttccctcagaaatttgaaatcactgtggcaactcggcccacccaggaacagacaggtcaagattttccttccaaacatctagcctctttcctggcactgtaataagtcagtgttcatgtccactgctttgtttctattttactttcatgtgtatatgatgttttgtgtccatgcattcatgtgtaagagagcaggtgtgctcatgtgaaggtcagaggataactgagaatagtatcagtcttggcattctactgccttttatttttctctgctacaaataccaggctagctagaccgtgagcttctcaagagtctcctgtttctgcctctatctcacactggaggaacaatgggcttacagatactcaatggttccagttttacctgagctctggggatctgaacccaggtcctcatacttgcacagcaaacactttagccactgagtcacttctctagacctcacctcattttaaatgggtcaccaggagccccacagatccctggacctgatactgcgactagtcctggggcattctttctatctgcctgtctgtctgctttctgtgtgttcaaggacagaacaagcagaatggattgcctgcagtcctcacaccttaggttggccactctaataccctggctaaagatggcagcacccatattgcattggtcatcctgataacttaattcaggaactcacaaccagccaaagtgcagagaatacatgtcagtggaatgcccaggcacaaatggagccttttatcactaccccacaatgctcagaggccactgaggaagaggggacaggaagattgtaagagctaaaggccagggaggaccagaccataacagtgtcttctgaactcatgaactcacagcaactgtgattacctgcacaagactacagaggtcaagtcagtcagtgttctagtgggagtggagaggggctcttgatcctgcaccccaaactggggaactatgggctatttatgacttcttagaagggaagaaagagtcaattttcttttaagactatggctgttggtgggttaactatgccccagtggacagtcccacacccacaagtataagatcggcacaagtctgaacagtacttgatttgtactaatatctgagactggaaaggtaggttgtttggttttttgtttgtttgttttgctttaatttcacttcagagctgatgttaatgggtccttacccaaggagtcagaaactaaagaatagggtgactgtctcttatacactaaaggcttatgttcaatttgaatatttctcatacacttagttgtatgagtttctttctgtgaactgaacacaaaactcaggaattggtggattcatatgtaagtcctttaaacaatgtataattgaccttgagttttgccagactatgtgacttgactttgaacattctgatctgagggttatctctcttcataaatggattcacaatgaaaaaaaaaaaagatcggcacaaattgaactcggggttatttaaaaaaaaatgtgtaacacaaagttgaggaaggggtgaggtaagggtggatctgggaggagtagggatgaatatgatcaaaatacattatatgaaattctcaaataataaaaacttctttagattcattttattttgcatgtatgggtgttttacctgaatgtatgtatgtgtaccacatgtgtgcctggtgccacagagatcagaaggtgtgacatcagatccctgaatcagaagattgtgaacctccatgtgggttctgggaatccaatccaggtcctctgcaagaataagtgctcttaaccactgagccaagtctacaggtccaagactaaaaacgttttaaaataacagttggtcatcataagagaagctcatctttagttccctctaaaattgtaaatctgacaagtatgaaaaaaatattgataacatctttgtgcgttccagaaaaagaattataacaaaactcacattgcctataatagagaattgattgtaaaagcagtaacatctcaaatatatgcaagtactgcttaacctgaataaaatctttaatcttccctacaaaaacagaagttgatcatcaacttttctgaatacagacggcatgagacagggtgggccagagccctgggtctcatttggggagggaagccctgtggagaggcgtcaaggctggctaaggactttgggcagcacagggtcttgcctagagttggaggctagtgagagctaatgcaaggaagattgcaagggctgcacatctgaaatgggtgactgcctaccttgtcatcagcagcatgtgttctgctttcaggacaagcacaaaactacatggtcacctgcaggtttgttttcttacccaacacctaagtgcagagaatacgtgtcagtggaatgcccaggcacaaatagagctttttaccactaccccacaacgctcaggggccactgaggaagaggggacaggaagattgtaagagctaaaggccagggaggaccagaccaaagcatccagcctcccagggtgcactccttagggctcttctgggaacttcagaagttcttattcagaatcctcccctcccatcctttgtgcttttagtcagtgactgaagtcttgacgtcttgcctggattggccaggtggttgtctggaccctgcaaagaggaaacagaggaagaaggactctcttgggagtacctgctctggccttaatccacccttaagctcacagggatgtagacagacccttttcctaaaaaatatgtagaaaagccagagagccagacagctcatgcattaacttgtagaggaagtcctgtgggtttagggatgtgggatttctggaacagcctggattacacgagacgcttgttggatgtgggtaagacatacatcttggcttttccattgaggtcacagtaaatgagtctgcctctctctccctgaatcctggcctgccactgaagtaaatgctcccagaaactcagagggcagatgagaagggttgcttcagggttcagggcaacccctgggatcactattaagttccctgtctctctgctttctctcccacaggacccagccgccgcctctatctcagacggagactgtgnnnnnnnnnnnnnnnnnnnnnnnnnnnnnnnnnncaagtgaagctgggtgagtgtgtctggaggatgagggggatgtgggaagtgaacaagatactctcgggccgggtttacagcaaggcgctacaattaaagtagctcaggctagatgattccaagactaaagctccaagtaagtcattggtactcccaggcgccttatgtcgtgcaagacaaagaagacagtgatggtctctgagtgagagacctctgaggctagagaccctaagtattcaaggggtggctgtaaggtatgtaaagcatagaaccccaggacaggattcagaagggccagccaggaggaacctgcctccaaaagatatggctgctgccatgtttgagggacaggtctcaggacctggatggggagattgtccctttcttagtgaaccccagaacacctctctttccggatatctcatcatctttctctcagggtgggttccatgtccactctgatgtccatttcctgctttgaaatcacctggctcccacaactgcccagagctccccattctctgccaaacactgcccctcgcacttcatggaccaaaatctcactnnnnnnnnnnnnnnnnnnnnnnnnnnnnnnnnnnnnnnnnnnnnnnnnnnnnnnnnnnnnnnnnnnnnnnnnnnnnnnnnnnnnnnnnnnnnnnnnnnnnnnnnnnnnnnttctctttaactaacttcccctccacagctatcaggattccgttccacagtgtctgttcttttagtctattcaaaataaataaataaataaataaataaataaataataaataaataaataaataaaacagaccttgcttctttgcttctagaccatatcaaagaatcccttctggctaatttctaaacaaagcagcagttctctattttctgtcttcctaggacattttcttcagagcacagccagttttgtttattattgtttaatgcaacgataaaagtatttttaaatgcatataaattctttactctttccagaggcaaccactgcaagttcttgtagcttcattttgtactttagcacaaatggcattgcattgtacacatgttccctcccactacataatgtctcagaacctctatagagaatgagttcattcttttaaatggttgcatagtagtccttagtctgagccttgccaacttattgtctgcattttttatgatttcaaacaaacttagcacacttttaaaatagcattttttatttccttcacattgcattaccaccaaagctcatgaaaattcacagcttgtctcacttctgataaaagaaaatcaccaagaactgtaagtcaaattgcaccccctagaggctggatgtggtaatggcagttactgcctgctgaagagaagctggaaaaatcccctgtagccaaagaggcaaaaaaaaagtggtcagggagtaagacgaaagagcttcagaggcgtgggaatcagaggacatttcaagtgagtcacaggtgctgtaatggccccttccatccttatgctcttgcttttttgtttgttgtttgtttgtttggaagggtttctctgtgtagctctgactgttctagaacttactctacagaccaggctgggctcaaactcagagaaccatctgcctctgtctccagagtgctggtattaaaggtgtgctccaccactgcctggctcatgccttccttcttaatgtcctcctccctccaggcttccctggctgcttcatccttctgtgctcatctttcctctctagcctgtccttggcttcaggcacatactgactgcctggcacaggaactgtggttcccagaggcaggactcggctcttttcctcccctacactctgccccttaagttatgcaggttcaagagcatgtccctcagcatcaggtgcctggaggaccatgggctgtgtgccagggagaaaaggaaatgcacaaaaagggcccagagcaggtcgccctcccccccccagcccccgaagcagggcctggggcaggacacagcgtctttcccatgttcccctgcagagaagcagcgggagctggcccggaagggttccctgaagaacggcagcatgggcagccctgtcaaccagcaacccaagaagaacaatgtgatggcccggacgaggtgggcatcctccctgccccactgagaccccaccagccaacacctaccttctctggtctccagcctctccctcctcaggggactgcagggagggggaggaaatgagggagcaggaccctgtcaagccccctgccatgtttgtatgctccagctggtactccatctccccaattctttacccaggctggtcgtccccaataaaggctactcctcgcttgccatgggccctgatgagaagccactggtagctcttgacacagacaggtgtgtatggggcctgggggaagctggacaaacccatatttctatgtgagcacagatggggttgtacaggacacatctgccatattgccagaagtggggtatacttcaaccagagctctccatgggtgaaatttcccaaggggatagattgttttttaaaggaatgggcatggagaggacatagtgagaagaaccctatcccaggggagcatctggctagccagagaccttaagggaatccaaacagccaggatgatttgaatctagggagagaaaagtaaaaacaaaaacatgaggacgaggcagaaagaaagagactatagcagttctatctagaaggaagccgcttttatttgaaggttggaccgggaaacctgtctttgcaaacatatatttgcataataagcacggattatttaaatcatactgttggagaacagtgggtatggcaaagatgcagagaattttctatttaattttcctgaatcacttcctttctctcttatttccacggccagtgatgatgacttcgacatgtccagatactcttcctctggctactcctctgcggaggtgaggctccacccccttgcctccacagactaaggggagctagaccacttctccaggctgcaaggctggggctcttcaaggggaggtggggcggagcctttggggcggggcttcgcatgaggcggggtctgggctgggagagcctgggaagaaatcactactctgacagccccgggttattaaagcgggactctaaaacagaacatgtgtggaatgcaggcaacacctaacaggagtggacctgaaatcggggcaaatcctgaactgaagcaagagtagagaagttgacactgaactgggcaggggcctgtagaggcccggccttaggaagacttgcctggaggaagtgagacccaagccaggccggagtttaaaataaacctaggatgagtaggggctgtcactgtggcctcagggtggcagtggcggccccagcccagggagatgcccttccagctgactcgaaccttttctacagcagatcaaccaagatttgaacatccagctgctgaaggacggctaccggttagacgagatccccnnnnnnnnnnnnnnnnnnnnnnnnnnnnnnnnnnnnnnnnnnnnnnnnnnnnnnnnnnnnnnnnnnnnnnnnnnnnnnnnnnnnnnnnnnnnnnnnnnnnnnnnnnnnnnnnnnnnnnnnnnnnnnnnnnnnnnnnnnnnnnnnnnnnnnnnnnnnnnnnnnnnnnnnnnnntgttcagttacttgggggagaccacacccaagcaccctgccacctctccccagagctgcagtcagggggcagcactgaaggccaggaggccaactgtaagcagaaagaggaagggatcacaaggccaggggtttggccccatgccagtgaagccatgaattccccagccctagcctggaaaggaaggaaagggggttggggaagaaaaggccccaagcaatggggacaattctcaacacctcagagcccctcaccccaacccccgtgccagcccatattcctatttgtgtttccccctcatctccagatgggaagctaggcaaagccgtccaaagggatactatcatccctcattagatcactgccttctccctccctccactcaagttcccctgcttccttacattctgaggacggggagtgtaaggtgagccttagaggccaggtttggggattgtatgatctgttctcaacagcctctaaccagtgcatctgtccctgtgccccaccccctcaccccagtcttctggttattgcttccaggctggtagcaagagatagggctggcctccagtgcccggttcccggttcaccctaacccaaggtccaggaggctggcttccagaaaggctcttcaagagcaagcttgagagaatgcagtgcaccaagtggctgtatgtatgtggtagggtgtgtgtctgtgtgtgtttaacctgtctgtccaggtcaacctgatgggtatgtgtggtggggaaatgactgtggtcgatttgctgtatgaaaggctgcttaagaaatgcagtggactgagggcctagcctggcagtcagaagcctgggttctagtgtcagctctggtattctccctgggctcttaagcagttcccaggcttctccaggtcttcagttctctcgactggaaaattcagaatagctgacattactaacagtcttttcagatctgaagaaatttcttcacaggaatttctgaagagagctttgagagcaactaggaggcctgaggtgtgtgcttgtgtagacataagaagcaaatacagatttgtttgggaaagaggtgtgtgtgtgtgtgtgtgtgtgtgtgtgtgtgtgtgtgtgatttacaactttgtcatttttgcttttgctgatctgggggaggaaagctgaggctgcaactcaatgaggaagagatggtagctctcccttggctggcagtatagccctgccttcattggaaaacaactgaaaacacagacagcctcctcgcactgctaggtctgtgccccaccagtctcctgccatctggccaaagtgtagcttctctgggcctcctgctgaccctccacaccttctggtgttttcactgtcatggctgctcccacccactctctgggtgccagtcctgggaggtaggagctagagtgggtgtggtgagaggaagaaatgaggctgttgactctccctacaccacccaggggctggctgcccactccaaagtgtcggagtgtagctctccactccccacagcttacctcccctagtgcagagatcctaattagatgagaaaatgccaaaggaggcaaggcagagaaagtgtctgcaggggccacaaggcccnnnnnnnnnnnnnnnnnnnnnnnnnnnnnnnnnnnnnnnnnnnnnnnnnnnnnnnnnnnnnnnnnnnnnnnnnnnnnnnnnnnnnnnnnnnnnnnnnnnnnnnnnnnnnnnnnnnnnnnnnnnnnnnnnnnnnnnnnnnnnnnnnnnnnnnnnnnnnnnnnnnnnnnnnnnnnnnnnnnnnnnnnnnnnnnnnnnnnnnnnnnnnnnnnnnnnnnnnnnnnnnnnnnnnnnnnnnnnnnnnnnnnnnnnnnnnnnnnnnnnnnnnnnnnnnnnnnnnnnnnnnnnnnnnnnnnnnnnnnnnnnnnnnnnnnnnnnnnnnnnnnnnnnnnnnnnnnnnnnnnnnnnnnnggtttctccgagctcactaatttatttccaagaaggtgtgtggaagacatgagccgtgtataatattttttttaacatttccatcgcagtattgaccatcatccttggttgtgtatcgtgtaacacaaataatgatattaaaagcatcaaacaagccagactcagctccttacctggggtgtgggctgaggaagggagaaaactgaccccaagatgcgcatgtcctctacctctgcttgttgctgatgtgtggccctaaagaatcacaacccctcctaacctctgcctctcttcagcagtgagacgtctgtcctacatgtctctaggagcctaggaagtggatattttgaagggtccaaggcaggaaggggctggcatagggaggaaatcaggcctcttatacagggatggggccaaggcgagtgatatcataatgggcactgcccatcctggaaaggaagctgggtggagtagaagcaggaagcctcgggggagagatactgagagatcccccaaaggaggggttacaggtgggaggtgtgggatatttaggggaaggggtggtcactgatgtccaccaggagtccttgacaggcagagcccactacagcatccctgagactccatcatgttcctcttctcccggaagaccaagacccctatcagcacctacagtgactcctacagggctcctacctccatcaaggaggtctataaggacccacctctatgggcctgggaagccaacaagtttgtgaccccagtaagtacagattgtgggtagggtggatatacaattgtgtgtctagatgactggcatgtggctgtccctgtgtagttattttcagtttttttaatttcatttatgaatttgttttttgtttttgttttttgtttttttgagacagggtgtctctgtgtagctttgagcttatcctggcactctctctggagaccaggctggccttgaactcacagagatccacctgcctctgcctcccgagtgctgggattaaaggcatgcagcaccaacgcctggctcatttatgaatttgttttgtttacttatttattgagacaaggcctcactcactatgtagcctaggctggccctaaacttgtgacagtcctcctacatcagcctcccaagttggctgggattgcaggcatgccccatgcctagccatttggtgattgctttgcatttacggcagattctaataactcaggcaagccttaaacttgtaatgtagcctaggctggccttacattcctcatcctcctgcctcggcctctcacattctgggattatagcatgtacatcaccatatctgcctttattttttttgtcattgttcattttgtgtagtgctggaaatcaaatccaaggtgttaagaatgctaagcaagtattctatgccttgaattttaagtattatttgtttgcatcatattgaatgcatcacattcaagactgggattcaaactcaggccctcatgcctacacaacagatgctattactcactgagccattgctccagattcttaaggtttgctataaggtctcagtagcttacttactcaggctacccctgaacttgctctgtgtgcctcaaccctccaacagttgggattacaggcctgctcccagcttccttttctgtattttattcattttcctaggtacatccagcagtgtataaaatagtatagggttctgtcctcgtagaactacatggggggggtactaataagaaaaaacccacaattttcttaagttgtctaaaatgctgttccgcaaataaacatcataatggcaatgagggaagcccactcctacatgtcacagaaggcctttctctcaaggtgaccttgacctgtagctggaaagatagggaaaaatgggtgaagaattaaaagaagagctgaaagtgcaaatgctctggggctacctgcaaaatgggtcagaaatgtccaagaggcaatatcattatgcatgggcattacattcccttctgtgtacaccgggagatagaagaggagcaatggatgtggggaattatagtttgtggtaacaaaaagaatttatgaataggatttttaaagtattttgtctaaatatgctctgtagaaaaggaggagggagaacttggaggatggcaaactgggccaaactgggctgcatatggatacctgtttaaagccctacatctcacataaagttaatgggttttttaattctattttgaacaatcaaaagacaggattgcctgataacaaatgctaataccagcctatgagagatgcttatcttaaactagctgaaagtagaggaactactgtgagttccagactgaaattcaaggttcaatgtctctgactacacacacacacacacacacacacacacacctctgtatgcacacacactcacacctccatacacacacacaacacacacacacactttcaggcatacatgaatgcacacaccagcaaacatacatacctgcacgcacacacaacaaacacctgcacatacacacctgcataacacacaacacacacctacatgcacacacacacacacacacacacacacacacacacacacacacatctacatacacactcaacacacacgctcatgcacaacactgtataacttctatgagagaaaatatcctcactgcaggtcttcaggtatccaaagtgctgccaaatcaacataagttcacaataagatataagacaataaatcagggctggtggtgttgcttggtggtaaatcacttgcctagtctgatgcacccccaaccctgctaaaaagaaaaagaaaaccaggtggtagcacatgcctttgatcccagcactcgggaggcagaggcaggcggatctctgtgagtttgaggccagcctggtctacagagtgagttccaggacaagctccaaaacaatacagagaaaccctgtctcagaaaaagaaaaagaaggaaatatgatatgaaaccttatctgcataatgaacttgtatttgcattctgtatacaaaaaataataatagttgcctaccaaatggttctggggtggtgactcctgactgactgacctggtctcttggacccacatggtggaaggagaggacagactcctgtaagttgttctcctgcttcacacacacacacacacacacacacacacacacacacacaccccacaaaatgaaacacaacaaaaatatttttggcccagtgtgatggtacacaagcatgataatgtacacctttaatcccagcattcgggaggtaggtgaatctctgtgagttagaggctagcctgagctacacatcaagttcgaaggcaggactacacagagactctttctcaaaaaaaaattaagtggggctggagagatggctcagtgattgctgggcaaacatgaggacgtaaattcaattcccagcacccagtgtgaagagccaggtgcagtcctcacacctgtaatcccatggctggagaagtagagacaggaggacccctggggttttctgtctagtcactgaaactagatttctgggttcagtgagagaccctgtctcaaaaataaggcagaaaatgatggacattgccttggtcttcacataaatgaccatacatttgcagttgcacacacacacatgataaagaatttttcaaacagatatgaattacatatattcactacaaagttataaaaagtcataaatagatgaataaacaaaatagcatagttcaagaatagactcatacatatatggaaacaatattcagcaaaaatggttgacaataaagctatggaaaaagattcatcaggcttgggtggcatggcaaatccataggggaagaatagactgcttagtaataaaattagttattcatatggatagaaataaaattaatatataacaccacacccaaaatgaaagtcctggaagattaaatatggaaagtaataccacatagctttcagaagaaaatacaggacattatttccattatctgagagtatggatagatgtcttcagtcataaaaagcattaaccatccaacagattaataattcagctggtttaaattaagaacttctgttcatcaaagacatcataaagaaaattaaagaaaaaaaagccacgaactgagagatttgcaacatgtaactgattagcattcagaatacataaagaagtataatcctttgggttaaaattgaacacacgtgggttctgacccctgcctgaaaccacagtaaatggatacttgagatccagattcacaaggatgatgagaaagcaccaatggcaaggaaagcctggcaaactgaaatatgacagagggcagtaactgacctagcacacctgaggaggcagacgaacagccagtcgtgggatgcccaacgacggcattcagctcaaggacacagaattcaaaaaggctcagggacgaacagttctggttccctggagctgaaggtgggataggaccaaggctaaaatcagggttatttgaaagtcacttaaacagtcaaacctactaattgtttctattcattgcctcggggtgactgcctggctctggctctggaaaagtcacaaggcttttcttttttttcttttttggcaaggatcttgaaagcagatgagcatccatagagtgactactaaaacccccagcagcccttacccacactggcatctgggccattaccctaggccaaagattaaaggaacctttccaaagaagcagatccccattaaagtgtgagcatactggtgttgtggtcctcaagcaacagcccagtgatgctaatggctagcaaaatcgctcaaggcctcagatagttttttagttttctatttatgaacatgagcaaagaccacagacatcttaggaaagcctctaacagaaaaatggttgatgcctgtgagttcttccaaataggatctctctctctctctctccctccctctctctctctctctctcctctctctctctctctctctctctctctctctgtgtgtgtctgtgtgtctgtgtctgtgtctgtatgtgtgtgtctgagtgtttagtatgtggtatgtgtatatatgaatgtactttgtgtaggtttcagtgtagctagactacgtgtatataaagctcagggaagcgctgaattatggacccttgcacataaagctgcttccacccacatgggaatgtcactgtgccagatacctcaggacatcagttgggcacacgttttcccagaaggtcctgaactaaggacttttctgggagcaaccaggcaacacacacacacacacacacacacacacacacacacacacactcacagcctttgcccttgaaatcaaagggtcaagtatgagtgatctcagctagcttttcagactggctgtccttacagataccttatttgggattctggcctcagctgaagaccatggaccccaaaaaaacgaggtcttcatttgggttttcataaatctatccaaacaaggagtgacgggctgaggtgaggtgaacttcaataagtagatctcagtgtccagaacaagaacaggaaaaaaaccggtgtggtggtgcatgcctttaatcccagcacttgggaggcaggggcaggtagatctctgtgagttcgaggccagcctggtctacagagtgagctcaaaaacagcagggatacacagagaaagctttctatcttgaagaaaaaaatttcaaaaaatacaggaaaaaaatatcaagggcagataatgaccagaaagaacaaagtgagtctcaaggtcaaggctgaaaacactgctgtcagagaaagagccacggcagagtccaggtgttgttacatggtaaagcaggcatctcaccaaacccatccttcagtttcaaggtgccagatgccctccctgccccagaaatctacatagagcagtcaggtcccaggaagtcagccttccctctagattgtgtccactggccctgttagaggagactccagccctgtccccagtgagggctgcagtgcagaagagacaacagccacacatgtctcttaccttcctgagttctctgtcagccaggaatgggcagaaacaaagtcagaaaactaccccaactagggccaagggtctggttctgtgtatcagttttagatgagaaaacaagcaagcaagacaaaggggcaagaagatgattcaaaagcaggttgggaagctggagaaacagctctgcagttaagagcacaggctactcttgcagaggaaacacattctgttcccagcacccatacggtgactcacaaatgtcacctctagttctcagggttctggtgccctcttttggtctcttcactgtattgtgtggtgcatgtctatacatgtaggcaaaacactcatacacaggcaattaaaattaaaacaaaaatatgtctatgcagaagggccatgagacacgagatccatccctcttggactgggagcagctggaaatccagccaggctgaacttttcaagaaagactagatctagctccagcgaggtccctgggcttgggatctctctataccacttttcctctcttcctctggccagggtctgactcagactatgcaccgccatgtggatccggaggcccttcagaagatggtcaaatgtgctgcacaggactacacctacaaaaattctatagcaggtcacccttacttgcctgagaaatactggctctctcaagatgaaggtaggctctcaaccacttcctgtttttgaccttaaaagtggcccatcaatgaccctcaagttaagcccaatttggatcctgatctctaccctgattgtcaggactttggctacttccctaattggctaattccctagtgtacagggaccccctgtacactccgatacctacttattccagcccttggccctggagaagactcaaacccatattttgggggagtttgcaattttaaaatagagctagaatctaaccaggcatggtggcacatacctacagtctcagttatgcaggaggttgagtcaggaagagatcacttgagcttggcagtttgaggccaacctgaacagcatagctagatactgttggaaagaaaaaaatcactgggtaggtctgaggtctcacccacagcaaggtggagagagggttgactttctacaggccccacccacctcttcctttcccttagccaccctttcccatcagctctctctgctttctatcttccttccagcccttttacagcctggggtatagatatgggtctatactcatatcatttaggaaaaatcaactttctcctttggctacatgtttatgatctgtctccctatccatttaagaaggagggaatgtcttattcatagctgtaccttctccatcatggggcttcattggtacttttcttcctaagtatttgttgaatgaattgataattcccagttagtgctgggagcctggaacgctgaaatttcatgtgtgtgtgagatttttcacaccaactggaactctcggtgtttagcctctgagacaagtcctgcatctcactcttctggccactctccttgaaataacctccttcctcgacttcctagtctctagtacactcagtatggaaatgggggcttccccagggtgctagccagagcctccatctcttctcctaagatttatttgatgggttatttgatgtaacccatgcatgactttaatgactttttaaatgatttatttttattttctggcattgtgtttttgctggaatgtatgtctgtgtgaggacgttggatcccctggaactggagttagacatgtgggtgctgggaattgaacctgggtcctctggaagggcaggcagtgctgttaacccttgagccatctccccatccccatggctttagttgctgttatcataaatctttcaggccttgacctctcactagcattccattctcttgcactttgacctggatgttcaaacctcaaactcagcatgccaaatcccccagcttagaacagcaaacataacactcctctcctcaggcagctatttttcttgggcttcttttatgggtttataggatttgggttattttcattttgttttgtttttcgacagtgtctcactatgtacccctggctagtacagaattggatatgtagaccaggctatctggaacccatagagatccgcctgcctctgtctcctgagtgctaggtttaaagctgtgccaccatgtccaggctttaaaaatatttttattatatgtatcaattttgtatgtgtgtatatgagggggcaagcccatgttccagcccatatgtggaggtccaaggacaactttatggaattagttctctccttctaccatgtgagtctcggggattgaactcagattgccaggcttggtaacaattgcctttactcattggatctttctgtagcccaggctagcctaaaatacacaatgtcaatcaggctggcctccagtccttggtgagcctctaacccaagccccacaaatgctgagattgcaggaatgcaccatcaggccagagttcccattcatcctgtccctcaacctgtctctgtccttcagattttgggggagcgtaccatagagggccttgtaggatatagttaaaagggttttggactagaatagtatcttgtttaaatttcacttgtgggaaagtatcatagcttctatgttgatgttgggttgtaggatttcaaagatggagcaaggagaccagcgggataatcatcatagctttctatttccaagcattctttttcttcttttcctcttctccttgtcccccactcctcttctttagacatggtctcatgtagcccagaacttggctacaatttgtagccaaggagaactttaagctcttgatcctcctgcctccacctcctcaggactgggattatctagactttttgtttttgtttgtttgtttgtttttttcgagacagagtttctctgtgtagctttggagcctatcctggcactcactctggagaccaggctggcctccaactctgggattaaaggcgtgcgcccggccttgtttctggtgtttttaatcaggatatcaccatatagtccaggctggccttgaactcaaagcaattctcctgcctctgcctactagaattacaggaatgggccactatgttcagcattttttccaaaacttttgtatagattaactcatctagacttcacaacaaatcctacacttttgccccctgcagtgctgtaatttgaagccaggcactgtatgcaccgcagggtatattctgctaaccatgacattatttttgtctcctggtgaaggccatacaaggataaaggaatgagaacatagagaaagagggaagaaagtcaattttaaggttgaataggcagacctgggggcctagatatgctagagagaggggagggcctggcgtgatactttccaggctagttgactcaaagagggcggggcccggatgaagctgatagcctgatggatccaaaccttgctccaaagcatcccttaagtgagacatctgcagctcagtggcaaaaagaactagggttgtggacagggcatgatggtgttccaggcctgtgatccagcaccagggaaggtgaggtaggaggatagacagactggggctagcctgggctacacagacttccaggctacatagtaagatcctgtctccaaagtgaataaatggtacaggatctgcaagtctggacttgggagttggggtcagtgagggtcagctttgtgacagagatcagagaagaaacatctagaaggtcccaggctctggatggactgagaagtaatcctttctgacatctccactactatgatgaagaggacaaatgctgtacaagctacttagataatgaccgttacaacacatggaggacaggaccttacaacagcttctggaacaagtataacacctgtcttcctcgactgcctaaggtacctactgtgccagccacagttgcctgaggtctaggacatgaaaacacacacacacacacacacacacacacacacacacacaccgtcttaacattgcagtgacttccccatctgtaaaattaggggtttctattttttttttttttagctgacaatggaggccaggagttggcctgcaatagacccctgggtttcagtctctgccccggcttggtggtgacttgttagtgtgcactccttgaccgttttgaagcctgccaagtagtactgcctcagttgatctggctactatgactcccttgcgtcaataatgagcttggtcctccctgacccaccttcccctcctttgtgacgggaacaagggcgaggagacagttcaaaagcaaggtgaatacagcaacaactccaaacaaccccgagactaggggagctgatgaggggagactctgaagcctgaagaccgtttgggtattcagggaagacaacccctacccccaccccccaaaaagagtaaaatgcttccaggatgccgggatggaaacaggaatgcgaggaatgacgttggaggaccctcgtaaaccggagcgcctcaacgcctacggtaaatggcgggtagagagttgaagagtattgctgggtgtcaaggaggaagccagagggcagaatggggatctagagaagctagagagggtgtagttgtgtgtgtgtccctgtttttgtctctgcctcgggctctgatcctgcttttcccatccctctggctctgtctttgggtatcctggactctgggctcagagcgcgaggtagtggtgaacatgctgaactcgttgtcccggaaccggactctgccccagattgctccccgctgcggnnnnnnnnnnnnnnnnnnnnnnnnnnnnnnnnnnnncccggccgccactactgtctgcgcgggatggactactgcgcctctgggatgcctcctagcacagaacgccgcctgcagcctttgtgttcggtgcagccgactgtaaggttcgcagggatccgcccgccttggccgggctccacccactaacgagccccgccccctagagtccctcccaagtctcctgcaggctggcatctagcctcattctagctctgttgtttccacgccaggcccccatcggcttctgcctgtttacagggcctcagggcacaagcgaacagctaagacagagaaccagcaagaaggttactcccaagtcctcagtcctgtcccttccaacagtgctcaaggtcaacctgacaagtgtttgtattctggagatcctgcaaaacagtttcagaggattccaaacccctcacatcagccgcaaccttttctcacattcacaggccctggtctgtattggacccttgggtctggagacagaggttctagcctgggcctaagagaaccctcagcagtgggcaggaccatcgttggggcaaaggaagtggttactgctttcccacagggttcgtggattccttgagagcctagagagaaactcagcatccagactgcatccagccacagcagacaatactggtgggaggggggtgctttcatgtctgtgagtgttgagagctgtgcagagggggtcctgaaccgtatccctaatcctatgatgatctagccctcctcaagcctgattccttgtctaagatcaggtcttttccttcagaaggggtgtgtgttttgggaaagtgtgtgagcctctagaaggcctagaaatgctaactacttccccgagttgaagaaatcgctgtctcacagaagcgggggtgggggtggggggtcgggtatgctggatcctcaaaggctgcatctgatcctgcagattctggcagcaaaaaccaggcattggtggggaggggacttcctggagccttctcagaggccctgaagtagtggatttatgaagggcaaagaaggaaccacagaagtgatactgtacccaggttcttggtctggaatattgagatatgaggttatcaaaacaaaacaaaacaaaacaaaacaaaaaaccgacctcagccgggcgttggtgacgcatgcctttaatcccagcactcaggaggcaaaggcaggcggatctctgagttcgaggccagcctggtctccagagcgagtgccaggataggctccaaagctacacagagaaaccctgtctcgaaaaacaataaaacaaaacaaaacaaaacaaaaacaaaaaacaaaacaaaaaaccgacctctccttgctgtttcttccttcactaggaatgtctcgacctgcggtcaccggcccggaatgcattgtattgttacaactcccccgccgtcatactacccatttcccaaccttaagtaagtttggcgcattcacttgcacgctggagacagtgccttttggaggtggggatggtgggaaatgcctgttgaagtgctcaggcaggaaattaacgccagggggcgctaatgctattgggaagtcaatggttgagatacaccagaagacctcaatgagagctttgagttggcagcggacttagagtcaagggaattgggttcaaggttttatatatagggtaagaagtcaaggctgggaaattatgtattgggtatcgtaaatttaccagtagaacttgaggtcagtgtgtggtcagtgtcagaggtaaaatgttgacatagggttaatattgagaattggagtcagggttatctctccttacagatgggacacaagtcacttcaagaaaactggtggtccccagagaaacaactatgttgtacatcctgagtttgtgtctgagacctatcccgtctaccattcctggtaaagatttggccaggccaaggaagagggtggagcaataaactcttcaccacaaagactgtttcctgtgtccttacctagaaagatctggatgtgaactctctccagtcatctcaggacactcctaagtgccctcctgatatagcagtaatccagctggggtccttcccatcactgcagggcttgagtccagctagccattcagatctgtcaacttgaagactctctagccaacgttccctccaatatatccatgcacatagactcctctccatctcatcccaggtctccattacacctcccaaatgttctctgctcagaaaactttgccacccttcccccccccaagtctaagagctacagaacataattttggaaagactcacgatcaagaaacagattggtttctctatcctacaagggagcagagggtggggagctttgaaatcttctcttgctccaatgcttgctttaggggaaagggtatcatagcacagcacacccatctctgcactctgaagtacaggcctttttgttatttattttggtttttcgagacagtaactattctgaaactctatagaccagactggccttgaatccacctgcctttgcctcccaagtgctgagaataaagacatgtgcctggcccagcataggcatttataactaaaagttgtcactaagggaaggggctacacattaaaggtcagagggtgggcagtgcaaaacactgagcagaaacagagacactgctggtgctccttctaaggagctcttgactggggtattagtggacagtgggagcacaggtcctcccagaattgtgatacccgtttttacacttattatgtgttgtgtggagatgagtggttggcttgtgggagtcagctctctccttccaccctattggttcttcagcaggcttggtggcaaatgcctttacctgcttaccatcgctccagtcccgttttagttctttaaagtattcagctgcccaaatctaaagggaatggattctcaaagacttcttagtcagtgtttattgctgtgcagacacaccatgaccacagcagctctgataaaagaaagcatttaattggggcttgcttacagtttcagaggttagtccattgtcatcactgtggggagcatggcaacaggcaggcatggtgctggagaagtagctgtgagctacatcctgatctacaatcagagagactttgggtctggaatgggcttttgaaacctcagagcccacccccactgacacacttcatccgacaaggccatgcctcctaatccttataaacccttcatagagtaccatgctcaggtacctaagcactcaaacagacgagtctatggagccattcttattcaaaccaccacagctacctctgccccttcactttgcggtgctctcatacacataacaaacctagtctggagttgcaagaactccaacattcagcaactccttcatccttcagaactacatctcccataaggcctggggatcagccaggctagcgatggcctgctcataacaggggcggcgcctgaggcaggaggtgaaaccaaggggcaccaatctagaggcgggcccaaagggcagagcttgggcggagaggagaaagtccggacaaggcactcgcagcttcaagaggctgtgggggaggggccgcaggccaggggtggggccggagtcccaggcctgaagccacattggacggctgggcgtggccgagtagcccaagggcggggcgtaggaggggctcggccgtgcctagccaggcagcaaccagcaggggctgtggctgcttaacttctgttagcgtggaaagagaatctgccgggagatcccttctccccttcttccgtgtggtggtcactgcggtgagtgagcccagtaagaggcccttgaggccgaggggtgttgagctgcctaagagcacagtttctgaattttctcgttggtagagcaaccctggacacctgcgcccctcctttaggccagagggtcccagccggcgacgggttccttgactttcctctgcccctttgggccgcgtcgggtgtggcgccaagggtgggtgtcaagtattccaggctgagttagctcagtcacttgatctttgtggatcctgtccctgagcaggggagggagatgggcaggatcgaattgcctttgacatttccactccccttccaactatgtccgacaatggactctgccttaagtggttcagtttggctgatctgggccctcgcccttaaactgtaggctaagggctggcagccaaaactgagcttgagtgtgaagtcagcgggaagaggcttcttgggctgagcctataggaaggcccgctcagccgatcccacctgctagctttagcctgtgtttggccagatggtaggcgcgacaaattaccgggtcttgaatgccacttaaaagtggagccacagagttcctccccgacagctgcaataccagatgccattaaattgcccctttcgcacccctaaaatcttcctgatctgtctgcggcgagcagaagctgcaacagcccttgaaaagacaggcctcaacggtccacgcccatctctctttatggaaggtggaggcaaaattttgaatcccaaaatttcgccatccgggtgactgctgacaagccctgttttcccatctgtaaaagggacacaatagctcacagtgttgttggtgttggatgctgcaggttcctttggaaggacacagtgaggccccaacaaagtgggtgcttaagtctgtgggctcctgcccttcatcaaagaacataataattctaaaaattggttcttgaaacccaagtggtgaaaaaacttttgagaccatcaaagtgagcttttcaggcctccaggggccataaggccaacttaatatgtaagttttgaggctgagggggtctttctcatttagaaccagaccctctccttttaaccctttagtgcccagaatgtagccttggctgttgaataaatgacagacatgtacaatagtcaggcttggggccccacagacttctttgtgttccccttagctttgtgagggtatcagcaaaagacactgctacctacaggaaactagggcaactctaaatgtgtaggtggaaataagaggttattccagactagggttgggcagtgcctggggagattaaagttgtctggagggataaaaatggtaatcccagcagaggcagaggcaagcagatctctgaggccagcctggtctacaaagggtgttccagaacagccagggaaaccgtctcaaacaaacaaagataaaataatggtgctaagtattatcttctagaaccaaaattctgacctgcacctgacttgctatttttaagattcatttatgtttattttaatgtatgggtatttgcctgaatgtctgtgcaccacatatgtgcctggtgcctgcagaagccagaaaagggcattggatctcctgggactggggttacagacacttgtgagcagccgtgtgggtgttaggattcgaaccctaggtcctctggaagttaagtgcttttaactgctgagtcatctctccagcctctgcacctggcattcttgacagattctgcatgtaagagctggacaagtagaagagcctgagtagtttttcaccttggaagtcactggagacagacagatactggcacctgggaggcaactaattaaccatctgccagtctctctccttcctcccccccccccagctggggagttaagcaactactggctggcagtgtgtctgcctgtgtttgcttgtgacaggtgctgttcctttgttggactctgcccctgagggttgagacaggaggagttaggggcctttatcagaaggttgaaacaaaccttccaccaagcctaagttttcctgcagacatatttcaatgtttagcataccttgtgtgaatatttatgtgtgtggtggtgggcatctgttccctggtgagctgaagagaggttatcaggctagatgactgaaacctaccaaagaggtgacttgagggtttagggtagggaatgagcttggtagtcttgagataggcctggctggaatcagaaaaggagctgagctcagatgtggtgatatatgcttgcattgccagctatccaggttagggcaggatgatcacaaagtcagggccacttttctgggctgcatagaaatgtatctagaaccataacatgtctggagctctgattgcaatgcttacagcgtctctcctgggagacaagaaagatgagcagagaaatggatttacttgatggttagtggcttagagccagggagagtttgtgagcaaaggggcagagcagacaagcaagattcttcagcaagctcccgccccagccctaatgttggaccccagttctgccttcctccaaatcagtctctgtgactgaatgtggctttcagtgccttaatttccaaatagccgtctacttggattcaaaattaaattccatgactgaggtgtcctttttctcttgtccttgactctctagaggcagggaggccagcctacagactgccctgttaaaggtctcaaggaattggctggaccattcgtgcattcttaccatggccagagcttcttcaatcctcctccttcaggggctgtatgcttatgctgcgggcctggacagtgccttgcttctccgggtttgttttccactgggaaagggcagaagcatgctctctcattcacatgattctctccattcacagagttctcaccagtttggcaagcggtggggcctgagagaaaggagggtaagacatcaaccgattgtcctggacaagagccctgcctttgccatttgctaagctcttgggcccctcttctaggctgcagaaatggaaataccgtggaagagaaagctcagtgtcctttctctcccctttgcaggctcccgcaggccatattcagatgggtttggtgtggtgcttccttccttagctggggactaatgccccagaaccttcgggagaagagccaggtctaccagcgacaccgatctggtagcaacgcgggccccaaaagcctcaaagccatcccagcaggaaccatgtacactttcctgcctgacaatttttcacctgccaaacccaaggcctccaaagagctgagnnnnnnnnnnnnnnnnnnnnnnnnnnnnnnnnnnnnnnnnnnnnnnnnnnnnnnnnnnnnnnnnnnnnnnnnnnnnnnnnnnnnnnnnnnnnnnnnnnnnnnnnnnnnnnnnnnnnnnnnnnnnnnnnnnnnnnnnnnnnnnnnnnnnnnnnnnnnnnnnnnnnnnnnnnnnnnnnnnnnnnnnnnnnnnnnnnnnnnnnnnnnnnnnnnnnnnnnnnnnnnnnnnnnnnnnnnnnnnnnnnnnnnnnnnnnnnnnnnnnnnnnnnnnnnnnnnnnnnnnnnnnnnnnnnnnnnnnnnnnnnnnnnnnnnnnnnnnnnnnnnnnnnnnnnnnnnnnnnnnnnnnnnnnnnnnnnnnnnnnnnnnnnnnnnnnnnnnnnnnnnnnnnnnnnnnnnnnnnnnnnnnnnnnnnnnnnnnnnnnnnnnnnnnnnnnnnnnnnnnnnnnnnnnnnnnnnnnnnnnnnnnnnnnnnnnnnnnnnnnnnnnnnnnnnnnnnnnnnnnnnnnnnnnnnnnnnnnnnnnnnnnnnnnnnnnnnnnnnnnnnnnnnnnnnnnnnnnnnnnnnnnnnnnnnnnnnnnnnnnnnnnnnnnnnnnnnnnnnnnnnnnnnnnnnnnnnnnnnnnnnnnnnnnnnnnnnnnnnnnnnnnnnnnnnnnnnnnnnnnnnnnnnnnnnnnnnnnnnnnnnnnnnnnnnnnnnnnnnnnnnnnnnnnnnnnnnnnnnnnnnnnnnnnnnnnnnnnnnnnnnnnnnnnnnnnnnnnnnnnnnnnnnnnnnnnnnnnnnnnnnnnnnnnnnnnnnnnnnnnnnnnnnnnnnnnnnnnnnnnnnnnnnnnnnnnnnnnnnnnnnnnnnnnnnnnnnnnnnnnnnnnnnnnnnnnnnnnnnnnnnnnnnnnnnnnnnnnnnnnnnnnnnnnnnnnnnnnnnnnnnnnnnnnnnnnnnnnnnnnnnnnnnnnnnnnnnnnnnnnnnnnnnnnnnnnnnnnnnnnnnnnnnnnnnnnnnnnnnnnnnnnnnnnnnnnnnnnnnnnnnnnnnnnnnnnnnnnnnnnnnnnnnnnnnnnnnnnnnnnnnnnnnnnnnnnnnnnnnnnnnnnnnnnnnnnnnnnnnnnnnnnnnnnnnnnnnnnnnnnnnnnnnnnnnnnnnnnnnnnnnnnnnnnnnnnnnnnnnnnnnnnnnnnnnnnnnnnnnnnnnnnctagccgaggtccgcgttgggtaccagtcacagaacatctcctgcttcttccgcctggtggaccgcgactcggtatggggctacgacctgggcctgcgctctcttatccctgctgtgctcacggtcagtatgctgggctatccgttcatcctgcccgatatggtggggggcaacgcggggggggagcgcacagccggccgccaagatgggccggggccggagcgcgagctctacgtgcgctggcttgaggttgcggccttcatgcctgccatgcagttttcaatcccgccctggcagtacgacgcagaagtgatagccatcgcacacaagttcgctgctctgcgcgcctcgctagtggcgccactgctgcttgagctcgctggtgaggtcaccgacactggcgaccccatcgtgcgccccctgtggtggatcgctccaggggatgaaacggctcaccgcatcgactcgcagttccttatcggggatacgctgttggtggcgccggtgctggagcctggtaagcaagagcgcgatgtctatttgcccgccggcaagtggcgcagctacaagggtgagctttttgacaagacaccggtgctgctcacggattaccccgtggacctggatgaggtcgcctatttcacctgggcgtcctgacccactttcaagacccaggaatcccacagtcctgactccagccttcatgcagatttttaatcctttaccacacccgaagggtgcaccctcaggaagttcccacctctaggaaatgggcactgacaaaatgggcactgactgaaaagtgctccggccaacagcagtaggtgagacctggaaggggaagtacggaaacaacctcctgccccagtgcacactcctgacagcgcctcacccccaccctggacatagagaacagaaacctcttccctgggttggatggcccgggaactcaggaaaagtctgttctttctattacaagggtctggttttaaaaagcacacagaaacatctctcctcccactggcctttgtagccctttgtcctctaaggtgaggaaccgatgctcttcaaaaagttcccaaatagttttctaccatattatttagaaagtgtacctttagatgggcagtggtggcgcacgcctttaatcccagcacttagaaggcagaggcaggcggatctctgagttcaaggccagcctggcctacagannnnnnnnnnnnnnnnnnnnnnnnnnnnnnnnnnnnnnnnnnnnnnnnnnnnnnnnnnnnnnnnnnnnnnnnnnnnnnnnnnnnnnnnnnnnnnnnnnnnnnnnnnnnnnnnnnnnnnnnnnnnnnnnnnnnnnnnnnnnnnnnnnnnnnnnnnnnnnnnnnnnnnnnnnnnnnnnnnnnnnnnnnnnnnnnnnnnnnnnnnnnnnnnnnnnnnnnnnnnnnnnnnnnnnnnnnnnnnnnnnnnnnnnnnnnnnnnnnnnnnnnnnnnnnnnnnnnnnnnnnnnnnnnnnnnnnnnnnnnnnnnnnnnnnnnnnnnnnnnnnnnnggactcattccggactcaaccttggacccagccctgggccagaagtgcctagtgggcagatttgcagggccatgcaggccagacttgatgccttaattcaagaacctgtgtctgtgtgtatatgtgtgcacacgtacttagagagagagagagagagagagagagagagagagagagagagagaggagagagagagagaaatatatagagagagatgcccaccatagtctctgaatctacagaatgaacagaatatccctgaaactgaataagcctagaggaaggaggatacaggggcaaactcaagactttgattgttgaaccagccccttcccagatgctttccctaggacgatggcagcaccggtttgagtttagcacactagagctcggctgaggaggtgactcaatggatgaaggcacttccttcatggcaagcctgacaacctgagttcaattccaaggtcatattgtaaaaggagagcactgtaggaaatcaacagccctttaagattacttagctgtctcactcggcacacatgctcaagtgtggcttaaaagggaaccatgttctcatcccggcagtgatgtgtttggcacatgagtggcatcaaacactgatacctgccaacacatgtttcggggaaggtctttcatctcagtaattctcctgttctgagatcaactccagccagggtttttcctgactatgtggctatgtctggaggagtggcttgcaagagaaggtggacaatgagggagagagcagcttcttnnnnnnnnnncagcttcttccctcagtggctctggcaacaaagcctgtgcccgaatccttcactttctctgagtgaaaagccctgagcttcagggttcccacagatgcctgtctccagtgccaagtcttttgtttctttttgttggcaatgttgaagatagaacccagggccccaagcatactaagcaagcacttctccagtgagctatatccccagtcttcctttgtcaatcagctgggtgaccttgaataagctgattaaccccactgagcctgagtttttttttttttttatgtaaaagtgatgatgacacctacctccaaggtaattgtaatagtaagcacagatatatggaaagtgcctggcacaaagtaggtgctcaataaaagatagctgttgtagtatttgttgttttcttgcttgaaaacaaggattctatgggattttttaaaagacttacttattttatgcatatgagtgctttgcctgtgtgtacatgcatgcctggttcttgtggagatcagaaaagggcaacggatcctctggaactaacattatggatagctgtgtgccatcatgtgggtgctgggaatagaacccaggttctctgtaagagcaacaaatgctcttaactgctgaactgtctttccagacccttctggccttgtcctccatccctgacagtacctcttgtgcagtccaaagttgtctttcctgcacattggatctggcgagcttaacgttgctccaaaaggcctccagcagccttatattcactggtctctccctgcacctaggctgttgtgtatgtgttggtggggtgacatacagcagtctggaacccctttctagaaataatgggaggacctgaatggccattgagataatggccacctgaatgggcttccagatgagttaggaatgggttacgctttagccaagcaggtcttctaagaattttggccaccatccacccatttctgagtgaggtgtctctgattcttgcaagcattctactggtcctcctctacaagcacccaagacccttctccttccctgaatccagggtgagagggagtggcctctctatctgctggccactgttgaacaaagacttaaagggtaatttgctaaaagcattgactcttcccttggccctccaggtgcgcaatgagttaacgaaaaggcagaacaaaagcttggtatgctgcctctattttgcacctgtttcttttgcaccaagtcattctcttacagcctggtggtttccaggaacagaccccctagataaatatctgtgacaaggaacaaaactacccctacctggaggcaactgaacaaggcctgccagaccaatcctgagataatgatcaaccaggccacagttgggccacagttgatgaactgtgcatgcttcttggtctggattttgtcccttttctacataatctggaagctattatgagaacctctaatgccagggctgacgacatcaccccctttgtcttcctagtcagtcatactaattaaaattcctttcctgatttccactatttctctgttttggagtcagatttgtcaggattcctagaatctgacctagcaacattctcaacttcagaccttatcagccacattccattgatagaccttcaaatcctacctacacaatatatccatagccataccaccctgaacatgtctgatcttgtccaacccacacaacagtcaaggagaggtatccaaagttcagtcatgtcccttgtaggatgggggtccaagttatggttggtgctcgagtcttctaagatctgatccttctcatacctgtttcacccatgtactcaggtacataaagtatatttgggaaagcgtttgaagaaacactgccttctatcctgggaacaactgtacagcttatcccttgccaggagaggtctgctcagacttagctttgaaagaaaatgcagtggccactgggtggtttcctttccttccattgtttggctccaagagtttctgctgacaacccccacagggtacaccccagctcctagacacagcctgtttttttttgttgttgttgttttttgtttttttatcttgaagctaatcatttacttcagtaagacctaggatctttccagcagcttgataagaggggaagctattcagctttgggtggtaaaccctaaggggcattggaggcgatgtgggaatgactcaaaagaaagccctgttcctgggtgtgcccagtctagaggatgtggaaatttatgcccttgtgctctgaatctttgcactgtttttccttctcaggtgcctttcccactccagcttacacaacaccaagtggaatgagggttttggagtagtctaagttctggctgcacctacatcaccacctcaagggggcagcaggaaaaagctggcaccaccctccagccctcaaattggtaaagaattaggtcaggccaaaggctaagatgattggggagttcagcctggacgacaggatggctttgccatgcatggttcccacccctgcacagaaatttctattgtatgtcatttcttaaggtcttcaattcagcaaacaagggccttctgttgagacataagccattgttttctttttctttttttttaaagattttatttattgtatatacaacattctgcttccatgtatatctgcacaccagaagaggccaccagatctcattatggatggttatgagccaccatgtggttgctgggaattgaactcaggacctctggaagagcagccactgctcttaacctctgagccatctctccagccccataagccattgttttcatgatcaagaggccattatattttctagagtctgtgccctaggaaaggaaacttatgcttgcctttcttgtagggttaagtccatcagttgctgcttcaccctaggtggaggaggtgggagtgaggaacaaggggattccagaaagagcacctctgggtcctggaaggaaatagaacaggtggctatcagggaaagcttccaggagaagcagatctagattttggaaggcaccaaattgaagaaaacattgaagcttctgtcctttgataggtgaagccatatctacaatcaaggaggtaagatacccttctccactgccaaggtatttacccagtcacctagcaggtatccaccctgaaggcccagagaaaaggcatgtcattccatgtgcattcttctttgtgcctgagatatgaaaagagataatggtcactttctaaacctcacagtctttatggaccaggtcctagctggtccaggggatttagtctgttccacttaggacattcacttcctcttccctttccagggcccatgattagcttttccatcctaccatgtttttttttttttttttttttttttttttttggttttgttggttggttggttggttggcttttcaagacagggtttctctgtgtagctttggctgtccaaaatgctcactctgtagaccaggctggccttgaactcacagagatccgcctgcctctgcctcccaagtgctggggttacaggcatgtgccaccaatacccggccagtcttaatattttaaaggcttaaaatatttttaaaggaataagcaaaagaaatgtaaggctatacattggaaactatctctacatgctgttaaaagacattaaagataacatggagagaagtgaagacacggccataaattgtatgaaaatggcagtactccactagcctacagattcagtataatacctactaaaatcccagctaaattctttgtggaaatcaacaagccaaaataaaattcatagtgagccaggtgtaatgtcacacacctttaatccagtcccagtgcttgagagacagaggcaagtggatctctgtgaggtcaaggccaacctagtgagttccaggctagctagagctacaaaatgataccctatatcaaaagcaaataaccaagtgaataaatagataaaatccacagggaaatctaaggggcccagaatagccaaggcaaccttgaaaaagaacgaagttgaagactcacacttttcaatctcatactattgcaaacctataacaataaagataatgtgtgtggtaccagcattaagatagacatatattgtcgggtgtagtggcccagtacttgggaggcagaagtaggtagatctctgatctaaatagtgggttctagaacagccagagctacataatttagttctagacagctacatcctgtctagaaaaaaacaaaacagatagacatataatctagggatggtgagtatgtgctgtgcaagcctgacaacctgagttcaatccctagaacccacataaaggtggagggaaagaactgtcctccacgtgtgcactgtggtacatgtgcaatccttcatccccaccctggatcccacacacacacacacacacacacacacacacacacacacacacacacacacaaaaaatgaggtcctagggtttagatgattcggtgactaagagcaccaactactcttccagaagacctggctgggttcagttcccagtagccacatgacggctcacaaccatttgtcactccagttctgggatctggcatcctcttctgctctctaaaggtactaagtgctcacctggtgctcaggtgcacacacaggcaaaacccaataaatacagctttaaaaataaggaaaaaatatagttcaatgggatgagtttaatggaatggtttgaaaatccagaaataaacacatttatggtcagtgtgtgtctgtgtgtgtgtgtgtgtgtgtgtgtgtgtgtgtgtctcgtggggggggtgggtactgggtctccttatgctgagcaaacattcaaccactgaactacacttccagttcaggaatcatcatcatcatctttttttttcttttttctttttttcttttttcaaagaatagtttgggtggaggagagcagtctggagtgataactcagcagggaagagtgcttgctgctcttccagaaggggctgggttcccagcagccatgccatatggctcatagctgcttgtcattccagctccaaggactctgatgtcttcttctagcctctgctaacacctgcatacacgtggcatgcactcacacaaacaaacatgtaaataaaaacaatgaaataaatctgtttgttttgagacacggtctcacagcgtggccctaattcactttgtaggccaggctggcctcaaatagatatctgcctgcctctgccctgccagcactgggattattaaagatatatgccaccatgccctgcagatccatttattttcttcttcttcttcttcttcttcttcttcttcttcttcttcttcttcttcttcttcttcttcttcttttcttcttcttcttcttttcttcttcttcttcttcttcttcttcttcttcttcttcttcttcttctttcttctttttcttcttcttcttcttcttcttcttcttcttcttcttcttcttcttcttctagagaatagtttagtgtcatgaaagggaagagtgggctgaacaataactagaacatacattgcccaggaatctttttctatttttaaatagagtctctctattaaatagctctggctgtcctagaacttgctctgtagactaagctggccccaccacccgtctagcaggtccagttattcagggtctgaagaggcactgcctgaaaagaatcatgggcgggagaaaagaaggagaccatgcaagcataagtttttgtcacgttttcactttattgaaagaggagtaaagctcatataggagtgtggcaaggagggagggagtgagcatgtagcggccgctgatggtggggctcccgggatgggcatgcggagacatggaggaggaggtgaggagggagttagtacatctggtgcaagcggctagctaaagaatgtctgttgcctgaaaacctcctatgtttcttgtcctcagagctgcttatctcttcccggaacagaacagccagtggtggcagttgccaggtggcaagtccttcaaggacctgtaattttccattgctctggatggccccttaacttatggctcccaacagccccaaactcacagagatccacctgcctctgcctcccaagtgctaggattaaaggtgtgtgccattaccgtccagcagaaatcattttataaacaattggtgccaagacagcagaatactcacaaagtatgattggtgttggatcctctacttaactatcacataaaaaattaattcaaaatgcattacaggcccaaataaaactttaaactcctagaagagcgggtcccagtggtgaaagtctgtaatcctagctacttagcaggaggcaataggatcacacatgaaagcctgcctgggttacagtatgcatgggcaatttagtgagaggttcttccaatacaaaataaaaggagagctggagatgtaactcagtggcagagcatttgccagcacacctgaggtcctggtttgaatccctagtactgaaaagaaagtagatatgtaaagctccattatcttaggtcacacactaaacatatatgaaatctccattactttaggtcacacacttatgagacactgcaaatatagtcaacaaaagaaaaaagttcaccaatttaacttcattaaatttaaaaactttcatgcttcaaaatacatcaccaagaaagtaaaaggaaggctggcaagatggcttagttggtaaagacacttgccaccaagcctgatgaccagataattactgataaatacatggaaagatattaaaaatggtatctcaccaggacagcaaggataaaatcattaataccacttaatcctcactagagtgcccataataatatttttaaatcagatataactatggtgatttgaatgtaaatggccctaaaaggctcacagggagtggcattatttgaaaggactaggacatgtggtctgttagagtaggtatggccttgttggagaaaatgtgtcactgggggcggtgggctttgagatttcaaaatctcaagccaggcctagttggcacactgtctcttcctgctgtctgctgatccggatgtagagctctcagctatgtctccagcaccatgtctgcctgcatgctgccatgcttcctaccgtgatgataatgaatgaaaactctgaactgtaagccagccccagttaaatgttttcctttgtaagagttgttgtggtagggctggagagatggctcagtagttaagaacactagctggtcttccagaggtcctgagttcaattcccagcaacgacatattggctcacaaccatccgaaatgagatcctgtgtcctcttctggtgggatacctgcagacagaacactgtatacataataaataaattaaataaataaataaataaagagttgctgtggtcgtggtcatgtttctcttcacagcaacagaacattgactaaaacagaaaagatgttgaagaggctgtgtaggatcccagtcctcacctcaaacatcactggtggatctgtaagaaaaacagccaatttaaagccagtctacaagtacctcaaagactaaatatagctagcacctgatatacaattctacatttagttatatccaaggaaataaatttttattcacagaatttgtagcattttaaataatagctaaaaaaaaagagaacaactcaaattgggtcaactaaatatggtattttggaactatggaatatgaagtactagtgcatgctacaaagtgaatacccctgaaaatactagtaacaaaagactacatattgtataagttcactacatggcatgtccagaataggcaaatctataagggactaaaagtagattagtgcttgcttatgatttgggagaaatagcatgattgcagatggttatggggttttgtttttggttttttgaaggttgattaaaattctctaaaattgtgccaggcagtggtggagtatacctttaatcctagcactctggaggcagaggcagacagatctttgagctggaggccagcctggtctacaaagtgagttctagaacagacagggctacacagagaaaccctgtctcaaaaacaaaaacaaaaaacaaaaaaaaccctaaaattataattcccacaactcaattaatatattaaaactcattcaagtgtacactttaaaatgggcatttcatatggtatatgaattatattttaacaaagctataatcataaaagtggaatgaagtaatgacacattatgacatgaataaaccttgaaaacatgctcagtgaagaaaagtaagacacaaaaagtcacaaattgtatgatgcaacttatatgcttacttactgttttttattgttggagatgggggctcaagtagcccaggctttggactttctagctgctgaggatgacctaacccttgtcccttcttcctgcacctttcaagcgctaggcttacagctgtgcaccaccatgcttgggtgcagggttccagttacatgaatgctgagaaagggaaactccacacacaggaagtagggcaagtgtcagccaagaagacacgagaatgcttactaagaagtatgacagtttcttttttttttttgagtgttaagagtcttctaaaattaggtagtggtggagataattacgctgccttgtgattaagaaaaactaaaaaaagtatatttttcaaaattatgtagttcccagggtgttggcacatacttttaatcccagcacttggcaggtagaggtaggtgtaactctgtgagctcaaggccaacctgctctacatagtgagttccaggccagccaaggccttgtaatgagacctatgtctcagaaaaataaaagaaaaaaagatgtactctgttatatataaattatgtcacaattgcctttttaaaagcctccaatccaggtgtggtggcatatgccatgaatcccagcactcggaaggcagaggcaggtggatctctgtgagtttgaggccagcctggtctacaaaacaagttccaggacagcctccaaagctacatagagaaatcctgtctcaaaaaaccaaaatttcaacaggcgttggtgctgcacacctttaatctcagcacttgggaggcaaagacaggtggatctctgtgagttcgaagccaacctggtcaggacaggctccgaagcaatacagagagaccctgtctcaaaaaaacaaaaacaaaaacaaaaacaagcaaacaaacaaaaaatttctacccttatactcaacatattttacccattgttatgtctacatgaagctttatctgatgctggggtgctggggaaggaataactaacttcaatgtccctttccaattgaaagaaatttcccattgtctttggttcttctttcccatttctcagcccttcggagcttcatactgttaaaaactacatctgctcataaacaattttgccagactttgaatattttctgctcacacccaaaccagttttgtttttcttacatgaacaaaatctctctccaaaagtatgccttttcagctaggtgtggtgttacatgtctgtactcccagcacccaggaagttgaggcaggaggattgtgtgtctaagggcaacttgggctacatagttgagaaaatttgtctcaaaaagcttaaaaaaaaaaaaaaaaaagaaggagctggaaagatgctcagtgggtaagatcactggctgctccagaggaccagggttcaattcctgctgtacacatgcagctcacaaccttctgaacgccacttccaggggacccaatgccttcttctggccttcttgggcactgcacacaggtggtgtgcatacatacattcaggcaaaacacacacaggaaataacacataaatctaaaaaaaacaaacatttaaatttgtattcttttaaaaagccaagaatcaaaacaaaaataaataaaacgtgtcttttactaacagccacaataaatagaaacaaaacattttaaagctatgatttgtacaaaggtaataataatatatcagcattttggaaaactcataaacataaaaggacagttatcattctttgttgtctcaaccagaaacatttgtttctgaaacttattttctaaatttccaggtaagtttatataactattatttacaacatgttgctttttttttttttttttttttttttttttttttttaaaagcgggttttttctgtgtaacagctctggcctccggagtgctgggattaaaggcatgtgctaccaccacccagttttacaacaagtttctttaaagtacacacacacacacacacacacacacacacacacacacagcacgtgtaatggtttaatctagccaattaacatacacctcactttgttgacatttttgacgtgggaacacttaatgttcattctcaacatttttcaaaaatgttctacacaccggctggggatagagtactagtgctgcagacactgggcatggcaaattcccctttaatcccagcacttgagacagattcaggcagatctctgagttcaaggccagccaagtgtactctgtaaattccaggccagccaaagagctacaatgtgagatcttgtctcaaaaaacaaaacaaaacaaaacttaaggtcatccttagctataatgagtttgaagacagcctggggtttgagaccctgtctgtagaagtaatagtggtaaaaataataaacaaaaaagaaaaatattgttaccatgcttggtaataaatccagaaatgaatgctaacaacccttcccttattttttttcctttttttaaaggtttattttcattttatgtgtataggtgttttgcctacatgtacgtctttgtaccatatgcatgctctgtgccatggaaccagaagaggacagcagatcctctggaactggagtcacagatggttgtgagcagacatgcaggtgctgggaactaaacccaggtcctctacaaaagcagccagtgctcttaactgctgaccttcctttctagctccctccccttactgttaaaatgtggttttattgcctagtttggatcatattcatacatatcccctctgaatatcagagtccagcaacactgtccagatggacctataaagtcctgggctacagtgatcctgcctcactcttctaatgagctggatctatgactgtgatttcccaagaaaaaagtttcaaacatgctgaaagtctatacaacacacctgaatcatcaccctgagtcaatgtctgtagagcattttctttcttttccttccttacttccttctttccttcctttcttccttccttcctttctttgtttttcaagactgggtttcactgtgtagccttgactgtcctggaactcactctgtagaccatgctggcctggactacagagacccacctgcctctgcctcctgagtgctttgagtaaagacatgagccaccactaactgaccagccatttattttattttttagacagagctatatagccctgactgtcctaaaactatgtacaacaggctggccttgaactcacagaaatctgcctgcctctgcttcccaagtgttgggataaaaggtgtgcaccactacatctggcttgtagaacattttcttgattaatgattgatgttggtgggtctagctttcagtgggtggtgccactcctggacagggagcctgacttgcataagcaagcaaactgagcaaggcctgaatgggcaagccagcaaacagcattcttccagggctttggcttcaattcctacctccaggttcctatcctgacttccctcagtggtggagagtggactgagagcggtaagaagaaataaaccctttcctccccaagttgcttttggtcatggtattttatcacagtactagaatcattaagacacaaattggtattgggctcatgggctattgttatgacagacctgaccatgttgattttggaacaattatggaagaatttggaactttgtgttggaaaagttattatgtgttcagaggttaatgagctgttatgctggctaattttatgccaacttggcacaagatagagttatctgagaggagggaacttcaattaagaaaatgtctctataagatctggctgtagggccttttcttaattaatgattaatggggaagggcccagcccattgtgggtggtgccatccctgggctggtggtctggggttctacaagaaaacaggctgagcaggtcatgatgaacaagacagtaatcaatacccctccatagcttccacatcagtttctgcctttaggctcctgctctgaattcctgtcccaatgtccttcaatgatgaactacaatgtggaagtgcaagccaaataaaccctttcctccccaacttgcttttggtcatggtgtttcatcccagcagtagtaactctgagatatacgggaacttagaaaataacactgaaaagcagggtagatggtggaaggtctggctcatgaagtttcagagggaagcttgaaagttcctgaaagactatggaggccattaggtattttgaattaagaatctgtgattctggtcagttcatgctgaagaacctgttgtgtttaagaaaagaccaacaccattcaggaaaaatcttctgagaattgctttctcggggtcagcacacaggttttaaggatatgtcggagtcttgaagagcagctgaaacttagcactgtaaaagtccgggagaggccactggtgagattataaatgcatattgccatgactggtttgtagtttatttttttatgcataggagtgttttgcctgcatgtatgtataccatatgcacactacatgtgtgcctggtgcccatggaagtcagaagagggcatcagatcattaggaactggaattgcagatggttatgagtcaccacataggtgcttagaatggaaccaggtcctttgcaagagcaacagtgagccatctctccagccctctgtatttacgttttaatggaacaccccagaaggaccagaggaataattccaaaactaagatattctaactgatgatgatgatgatataacgtatgagtgtgggcatatgcataccatggcatgtgtgaagaggtcagagggaagtgttagaaattggttcttttcttccccagtagcatctggggatcaaactcaggttgttagacttgcatagcaagcactttcacccactgagccatctcactggcctctatgtaagatattttaaagaaccttccctgtggcatcttattttcaaagcttcccacattagacaacttccaggactaggggccatttgctttctttctcccttctcctccctactttcttcttactgtatgctatttttatttttgtttctcttccttccttctttccttccttccttcctccctccctccctccctctctttcctttcttttttttttttcctttttcgagacagggcttctttgtgtaacaacactgcctgtcctgaaactagccctgtagaccaggctggcctcgaactcagagatccacctgcctctgtctcccaagtgctgggattaaaggtgtgcaccaccacctcccagctgtttctttttgtttaagatttaaaaaattatttcatgtgtgtgggcattttgcctgcatggatgtctgtgttccatatgcatgtccccacctgaagtggacatcagattctttgggagtggaattacagacggttgtgagccactatgtgggtgtgggtgctaggaatcaaacccatgtcctctggaaaaagctggcagtgctcttaactactgacccatctctttagcccctgtttttgtttcttgtagatcaggttgaccttgaactctcagcaatcctcctgcctcagcctctaaagtgctatggttacaagcataccatgccatgccaggcatcatacatttcccctgcaatacaaataaacagcaaaatcaggtcattttcagtcccttccactttgatgcatgagttttagaatgttcagactctagtcttccactcttaagagcacagggctgaccagccagtccttgttaggaggcagcctgtctgtggtttggcaccactgcccagcaggcatttattaaatcagtgggatgtggtccctgctggcttggaagagaacattaagctccaaaaacttcctgcagcaggcctcctttggagagtgctgtgcaaaggggtgaggaacaaaaccatttaggtccttggctgtgctccaagatctgttcactagtgctcctgccctgtctgcacaaagaaccagtgactggaaacatctggaagcctgcttaagaccgggtgactttgctctccttcctcagggtgactgttcttgactccggtaatccaggttgacctttgccaatgcccccttccccttcaatcttctgcacttcattgggcaacagccctctaataaaatccacatgaacccagctgcaaacggcttctggaagggctctaagatctaacacctgcctcagcattcctagagccctagtagcaaggcaaaagaaggctaagacccaactcttgcaccttggggtcttaaagaggcattgtggagaaagccaataggcagggattaggaagaaacaatggcaagtctgctgaacacggggaaggtagttcttcgtgaggagcacacatgcaatgacctgggtagagcctgtaaacttgggctagcctcattctctacctcaatcatgatgacaaggctcattactctgggagacaggccagggtaaaaggcgagggtacatgtgttactaacctggggatccatggatgcctgtttcccacctctgttttggcccaggcagcccaaggttttgggtctgaaatatttcctacataactacaaagtatgtcggtgctggagagatatcagaacaaaacattcaatttctgcactccagttctattgccttggaaatcccaactccatgggtgtgtctgtgggcgaggatgtgcttggagttgcagcagcagaagggttgcctacatatgctggatttcttccaatctcatcccctagcccttagcttttgggggtatagcatttggacatagggttttctctggtttacacagtcagaacaacggtggtctaaggattccctctggctaaatccagagctctaattcacttcagtttttcctccctcactccctcccttccttcctgtttttctgtctgtagccctagctgtcctggaactcactctgtagaccaagctggcctcaaactcagaggtccgcctgcttctgcctcccaagtgctgggattaaaggcatgtgccaccaatgcctagcaacttcagttttctttttcccaacccatggcatgagtccaagaagtaaacacacaggctaaaaggcatgtaagctgtttgaagtttatcaagtacaaggatacagttactggggctggcattttaaaaattttacccctctgctttttaacttagctaaaattcttgctcttattttaaaagtaattattttctatggtagggattgaacccagggcttccttgctctcacctgaaaatgttgagctaattttaatttcaccaacctatctgctctgggttatagcaagccaaggaccagcacatccttccctggatgggaggatgggttcatttcagaagaccctcaaaggtgaaatggaagcatgtgttgcagtcagctcacaccggtgtggagcagaggaagtggtgtccttcttggagtgttgcctgcatctcattgaactgagccaactggcaggcctcttccagccctagccagcggtaagcttgatgctcctgggagaggcagatctctacattgtagtctttcactacagtcagccagtaaatgactgttttaggcttcttccaggccacatagttgagttcctttctgaagccctcgatgatggtcagttggcttgcttctatgcctgtttcctcctgagtctctcgaagggctgtttccaagtcagtctctccagggtccacatggcctggttaggaaataaagaagaaatcttcaacaggaactgaagctggattttccaggacagatgatctaacctcagggtcttcagtgactttcctgggaatacctgggcgaaaggaagtctaccgatggtcagtatccaaacatgcctaggaagggctacaaggcagacagtgcctggttctcatggtctgagaaatcccttcttcctactccatctttgtagagagtgacacaaatgtgcctggtaagccagatttagtggctgcttcattattgctctgttctttgttacactggggtggtgtgcacgggagggaggtgctctatcaccaagctacatccccaccgcagaacaggctctgccttctggtgttgagatggctttcctcggatctctgctctcctattcttttgagttttctccctctgatatgcacagggaccacttttctcttggagaccttaaagtaatttttctaaggagaggcagaatctcttgacagagtgagggctaactggaaaatccagtgaggactcaacaccctacagttaacaggcgcaaacgctgcactgctgcaccagcagctggttccaagtagccatcaaggctttttcaaattgttttcatcttcctaactgagcaaggccagatttcagactcacagggaaagtcctgatgggaacttaagactaaggacaagccaagagccagttctaagaaaatttgttggcaagacccaaatccaagccgacagctgccaaaaaactgttgcagcaacacttgaagctctgcagactgtggtggcccctagcgttacccatggcctttcccacaaattcttagtgtcccagaagggcccagaagcagtgagagggctctggtaacctgtacctcctcctggctcaggcactcatgtggagcaggaactgatagctgttcccttcttggcctggaggtggagctatacactagaagttatacttccagggctctgcacagcagcctagtggctagggaatggaaaataggaacttggcacttagctcccattctggagaaagttttctgcacaacacttcttatagtgtgagcaaaccacactgacagtgtattgaggaaaagtaggagagacactggtggtaacagggaatactattcaggatgtgccccctcctcctagctgtctgccaatcttagtacacccctcctggtaacatctatccagtttactgcctaccaatgttagcagggtaatttcatcccaggccagaaacagaaatgattagaagtcctttcacatctctaagtgagaggacccagcagtgtgactccggttatcaggagataagtgtgaatactatttacagtatttgtgacacctcttttaccttattctttcctgtgcaactcaaatgtgcaaaaatttctttcctattaccaagtcttgttttcttccaatctcagatatccatccatgcctcctcatcccactctctgtttttaatctgttggggctgttgactctggggctcatcccagcaactgccagagccaatctactattgctcactgggaccatccaaatggactcaatcaaggatggcttcagtatgccatccctatctgaagcagagttggattaaataaagacgttttaatgtaagtgtagcatgaggatttttttcccttttgcttttcaagacagggtttctctgcatagccctggctgatctggaacttgcttgctctatagatcagactggcctccaactcagagatctgcttgcctctgcctcctggagtaccagaattaaaggcgtgcaacaccactgcctggcagcatgagaattaacagaaaaagaggcagtcagaaaaagtaagacacatccaacagcatgggtggccttcagagaagagtaatgaaaatccatactcaggtgggtatggactcctcaagggacagtcattcagctcacttcttccagtgtagtctgccttctcttttaggaacttctgagagaatcttctgtaccctcaagatagcatccagaatgctagtggatgaaacctgcttacaaacacatcttggccaagtctaacccttcaggccactggtcttcactgttttgcttttgaaccctgactagctctatcctgggttctaagtgaggaactcggggcaaagatagccgttgaggctacaaccccaaggtctttatgatctttatagcctcttggtctgagaaggaccctttcactcttacccactgttcctgccagaatatgtagaagacctatgaataggaaacccagcttctctgtgctctaacggctccgaagtcatagtccctggatatgtgattcacaaaagaaaacccgaatgaaagaacactaaacaaagaagcaaaggaatttatcacattaaatcagaaaaagggcaggaaaaaaacatgggatttttaagtcaagctctactttgatacatgaaaaactaagaaaggtaggcacatagcccaatcattttactcaatttaaacattcttaattcccaagccagtagctcgtctcccgtttagccattaatgatgaaagcacaggtgaatgatataaaaacaccaagtgctatgtctgccttgggtcagctgcagaatcctatttctaggtctggggtggattaagtgttcctgcctctcccacctcctcctgctgtacagttggaaaagggacttgtagcggtctggcagggtggattcctgagctaaacttgacatttcccccaaaagctaatccctctgtccccaaacctttgggaggagtccagtgatgtatgccatttgatgcctgcagcagcagaaattcaattgtactgttgtccactttgggaataaggtgtcttcggaagatgatcaagccacatgctctcagggccatgatgtatctaggaagttaaaaatgatgtaaaacactgggaagccatacacagaaggaaaatccacatatgggggcgtagctggagaataccaaggactggataacagtgatctcacaacccacagaaggactgcatgccaaggaatggaggttagttttttagttttgttgttgaggaaattcctctaggagactggcctgtgggtaagcctgtagagcattttcttgattaatggttgatgtaggagggcccatcaaactgaagatggggtcatccctaggtaggtggtataagaaagcatgctgggtgctggagagatggctcagcagttaagagcactgcctgctcttccaaaggtcctgagtttaattcccagcaaccacatggtggctcacaaccatctataatgagatctggtgccctcttctggcctgcaggcatacatacaggcagaacactgnnnnnnnnnnnnnnnnnnnnnnnnnnnnnnnnnnnnnnnnnnnnnnnnttaaaaacatacacacacacacacacacacacacacacacacacacacacacacacacacagagagctaataaggccacacaggaaaaacatgtgataggcaacaatctgactccctctgagagattatagcaatcttactgaaagaagggttgtttgaacagagaaacaagagagtcaaaaggtgagttcataaaagggaggaagggagaatgtgattcaggtgcagggtaacaccctgggcaaaggtcctaaagtaggacggcagaaccaaaagaaagctacatgctatttcccttgttgttcaatcaagatgggctgccaagcacgatggcacacacctgtaatcccagcactatggaggctgaagcgggaggatcaccacaaatctgaggccagcctgggctacacagcaagaccttgtctcaaacaaaagaataaacaaaaagaggcactctcggctctcaaggcataaaagtcaggcaggcccaacacctcttccagagtaattctcaggatggctgtcaaatgctattttagagaagagcaccttctcatggataaaccaaacacctttttctcccctctcctttttttgcttctccttttttgttgttttgttgtggtggtggtggttgagaccaaaaagaaggtctcatgcatgtttggcaagtgctttatcaccaagttacaactggacacccacatcattctaaactggtgggtgagaaggtcttaagaattagaaatggctcagtgttttaagtctgtgtaactgggtgtggagatacactgtttgggagtgtttgagacagggtttctctgtgtaacagctctggctgtcctggaaattgattgtagaccaggctggccttgaactcacagagatcctcctgtcttttcttcctgaattctgggattaaagatgtgcactatcactgcctggtatatcaccgtttaaagcagaaaaaacatccattggaactggaatggtcagttacatttcagtataaacatctacctctgaggcatgcacacacacacacacacacacacacacacaccagtagaaccaaatgttctggctgtaagaaaatatttttggatatattaattgcaagaagtatggtacagaatatgtataatgagatcttttttgagttaaaaaattcatatgtaaagtagtagtacataggcttttacaaaacaccatgttctattttccgtgactccttatttatgctgagaacattccccattctggaagctgcaaggaaacaccttgtctctgtagaactattgaacaagtattttattcactggcttagcattcatgtagaaacaggtaactggtcctatgcccttcccacatctgaaataaatatagggtaccttcctcttgcctaagtaagcttagaaacctaagactagaaaggatcttgcccttccagagacaggaagccctagtatattcctcctttccactaccaccacaaatagagcatgaggaaggaaagatgccgccgtcatgaaggacaagaatgacagacctggggtggccatacaagggaggaaaggctagtgttttcctttggaaaggaacggaagtggggagaaagtcttaggatagtagaaacggtgcattctagcagtgtgtaaagaggctgcgctgaagaaacagtctggcctacaatctggtcagacagctaaagtcagatgtgaattctgtgtatgctggtctcacagagaaggcaaactgctagaaagggagagctcccggttaccctttcaattgactggcttaagccagctgtgtactagaagcctatcccccaacctcatagaatcaactcttcctactgatccctttaaaaataattaattgccaggccgtggtggtgcacacctttaatcccagcacttgggaggcagagacaggtggatctctgtgagttcgaggtcagtgtggtctacagagcgaattccaggacagcctccaaaactacatagagacatcctgtctctaaagaccaggaaaaaattattattatttacttatatttattgttattattgtgggaagtataggcatgacatggcacatgtgtggaattccctcctatttttatatgttctagtgattgaactcattgttcagctttttagtaagcattttatctatttaagccacgttgctggctcctacttctaactttgttttattttggtttttcaagacagggtttctcgggctggagagatggctcagaggttaagagcactggctgctctnnnnnnnnnnnnnnnnnnnnnnnnnnnnnngggtttctctgggtagccctggctgtctagctctgtagaccaggctggcctcaaactcaaagagatcagcctgccttcctgagtgctgggattaaatgtgtgcaccactacacccatctaatcattaaattttattattttacatgcattgatgttttgcctgtatatgtctgtatgagggtatcaggtcccctggaactgtagttccagatagttgtgaggtgtcatgtgggtgctgggaatgaacccaggtcctctggaaggacaggcagagttcttaactgatgagccatctctccagccctacttttaaattttttttttcttttaacttttgaagtagctcaagtgtcacctttttaatgaggtcttcttgcttgtaataactctataaatctctactataagactccatcagagaagactttgcctcacagaaatttaaggatttataataaggattcagtatgagctgagattttgtcaggcctgagccatcagactggtattaaagtgtatgcactgcaaccgtgacggttgcatacatacaacatacaactccagcttttcaaacctaatgcaaaagtttgttgtggtcagtactgagctagaaccattaagaagggaattctggtgctggagatttggctcagtggttaagagcatttacttgttcttggaaaggacccaggttcaattcccagcatccacatagaggctccccacctccttgcatgtgatatacagacatacatgcaggcaaaacactcatacacattaaataataaaaaaaatatttaaaaagaggattctgggaaatgtagttccagtatagctaaagtgacccagtacaaagccattttaagtatgcatcccttgtaaggtaagtctctgttggtacctttggcaggaaagaatcagactcagtctgtttccttggaaccctatttagcagttcaacagatgttcattgactcaacagaactctttctccacctcccactgaaacaaatgtttaagtatgttctgggaccctgggaaacagcccagtgttttcttgaagagtgccatttgcataaaagtcaatggagctattgttggttttctggtgttttggataagagggagctgaaagatccagaggcttgaaagtattcagctctcatacattctccaagtagattcaaacctcagggggttaaagaacacagcatccaatatgcaaatatgactgcagccaggattgcggaggtgagaactccaggctgacagcaggcaattcacacttcagaaaagtggcagagtgcctgcggtggttaggaaaaaagaaacaaaaaacaaaatacccaaaccctcaatgtcatcagaaggttctagaagctaaggaaaaatgctcttggctttctccacagacagaatttcctcacagcctaggacattcaagaccaatgggtgtgtgtgtggggggggggggaattaacagataaatggctatgctgccatagtccaacatgcatcaaattaatcaagaatgctactgtaaacagttacctgcaaaagctctcacaaacacatatttttatttgcttgcttatttttgtggaccagagtgtgaactcaaacttgtgtgaacaagtgaggtaagcgctctccaactgagctataccttcagtctttatataacaggttccctaaaattacttcacttttctgatggtctaaatcccttaaagcatagtgttttaagccaccatgctgtcataacaatactgtgtcacctacactatgccaagtttttgacaacttaagtttttaatgctgtaaggcaactctttaaggccaggcatggtggcacatgcctaaaatctagcattcaggagatcgaagcaggataatcttgtgttaaagatcttgtctcaaacaaacaagcaagctttttttctttttcttgagacagggtttctctttgtagccctggctacacactttgtaaaccaagttggccttgaactcagagatctacttctctgccttccaaatgaacacaaaggttatactaatgtacctttctcaaagctgaaattttaagaaaggttaagccaggattagtgacctgtaccttgcacctgtaacctcagtacacataaatttgaggtctttctgggccacttaagtcctgtctcaaaacataaaatacacataaggaagaaataaacataggtggctggtaatatggatttgaatctagagaaatctaactccaaagcctgtaattttatttaacatttaacagcttccttatcatgaaatagggttaagcatacacacatggctctgacagcatgaacaagtgattaataaaatcatcaccagtttaaaacccattggcctttaatctgtagactggagactgtataggatgtctagctggaaactcttctaccaaacaaattttatgtggggaggatgaaggtaaccaatccaactcaggtggggaaagtgtagccttaggctcctacaagtgcctagttgacaagggtatccatgactgcactgctgttttctaagaaatgggaactgaaaaccacatgttttgtttaaacctggtgactagaaagtctgcacaggcctgggaaggggaaaccaactctgttgctctcaagcagctccacgctctctctcttcacaaagcacaatggccctcaatccaactctccaacttccttctttgtttttggaagaagatgaggcatctgtccagacaaagttctcttgtaataaaaataaaaggaagaaaagagtaacagaggaggggctggagagatggctcagaggttaagagcactgactgctcttccagaggtcctgagttcaattcccagcaaccacatggctcacaaccatccgttatgagatctggtgccctcttctggtgtgcagatatacatggaagcagaatgttgtatacataacaaataaaatcttaaaaaaaaaaagaaacaggaaaaattatatgaaaaaattcgaaacaaagaaaatgctccctcaactatacctttctctgggccttggcttcctctctgggagatcaagtcgatgaatcatttttcaatctttgctatttggctgaggagaaagtcttacctgcaatgacatactggtttctaggatcagggcaaagtcagacaaggttgggaccaaaaaaaaaaaaaattatataatgttaattctgttatgtggccttttagcgccacctgctgttcagttacagaaagctgacttaagtaattctaatactagaacctacagatggatatcctttagtcacctgttgtctgctgagtaagttctctatggcaggattgaaggggaaattgttctagagggtcacagcctagtgaaagcaaaagacaaagagatgttatgaagtgtttcatacatcataaggaagtatgtaagacagaaaagcaagctggacagtgatgcagcaggcaccttgggaggcagaggcaggctgatatgggtgagttcgagttccagaacatccagggtatatccctgtcctgtgggagaaaaagacataaagacagtgaaacaggatctttgggtcaaaggggtaccccataaggatgttcatgtgtgcagcacatgtgttttcacctgggtgttaggttcagactcagatccccatagttgtacagcatatactttgtttagactgagccatctctggagcaccatcataaagacctcacactaaatggcattctattggcaagcagcttagtttatattgttttttatattttatttttattttagggtctcactacatagcccttgctgacccagaactctctatgtaaatcaggctagcttcaaactcagtgatctgtctagctctgcctctggagtgctggtattaaaggcatcctaccatgcctggattaatttatatcctgtacacaataaggactactggttttaagtaaattacattttggtcagactgacattttacaaaagcattttgacagtaagcaaggtggagaacaaattggaagaaaaaactgcaggcaaagagaccgattgttacaagcttatttcaacagcttgtaaataacaggaaactagattaggagcgagcctatgagaaagaagcaggccgggcgatggtggcacatgcctttaatcccagtactcgggaagcagaggcaggcagatctctgtgagttcgagaccagcctggtctacagagcaagttccaggacaacctccaaagccacagagaaaccctgtctcaaaacaaacaaaaagaaaaaaaaaaaaaaggggtgagtatgagatgtcttaaggaacattgacgaagttgatatttcattgtgtaacagagaaatttcctaagtccaagggaaccaggagaggtgtttggtttggataacaggatgtgaaaggaagtagctactcattttcatttgaattgagctgaatttaaagttctatagactgtccataaggtaaatagaaactaggtctaaaattcagtgatatctcactcaattcttaattttctaaactggacactttttattcgaaaaataattgttttcatcattgatactttgacaacccacgtgctgactactttcatgtcaacttcacacaagctagactcacacaagcaagagggagactcagttgagaaaatgattccataagatgtaggcaagctgctgtacggcattttcttctctttttttttttttttggtttttcgagacagggtttctctgtggctttggagcctatcctggaactagctcttgtagaccaggctggtctcgaactcagagatccacctgccccagactcctgaatgctgggattaaaggtgtgcgccaccaacgcccagctgtacagcattttcttaattagttattgatatggaagtgccctgcacattgtgggtggggtcatctcctgcattggtggtcatggattctgtaagaaagcaggctgaacaggccacaaggagcaagccagtaagtagcactcctcatggcctctgcatcagctcctgtctccagattccagtcctgtttgagttcctgtcccaacatccttggataatgagcagtgttttgggaagtaaaccaaatacccccccccccccagtggtggcaaacgcctttaatcccaacactcctgaggccaacctggtctacagagcaagtaagggctaggcattgtgctacctttcttcacttagtcttttctgcaaactggggaggcattactaccatttttcagaaaaggaaaaaaactacggctcagaaatatttttcagttattcaaacgcagggatgtcaaacttctaacatcattaatcttaacttccatcagatactaaacattttgcgtttgacaacttgattgctctttctaagattggagtcttgtggctttgtttgaactgtctcttcattaaaaaaaatcttttgtggctggagagatggcttcgtggataagagcacttgctatccttccaagggactggggttcggttcccaagaacctatactatctcacaatcgcccttaactcctgctcctgggatccgatgtcttctggcctccgagggacctacaagcactcggtgcacacaaactgagacaggtgagagcgcgcgcgcgcaaacacacacataaataaaaaataagtagaatttaaatatatatatgcatatacgatcacttggaaggcaggcagggtttaattgataacaacaaagcaatgttgaggcctacgctatgatgactggccttaaaaatcccannnnnnnnnnnnnnnnnnnnnnnnnnnnnnnnnnnnnnnnnnnnnnnnnnnnnnnnnnnnnnnnnnnnnnnnnnnnnnnnnnnnnnnnnnnnnnnnnnnnnnnnnnnnnnnnnnnnnnnnnnnnnnnnnnnnnnnnnnnnnnnnnnnnnnnnnnnnnnnnnnnnnnnnnnnnnnnnnnnnnnnnnnnnnnnnnnnnnnnnnnnnnnnnnnnnnnnnnnnnnnnnnnnnnnnnnnnnnnnnnnnnnnnnnnnnnnnnnnnnnnnnnnnnnnnnnnnnnnnnnnnnnnnnnnnnnnnnnnnnnnnnnnnnnnnnnnnnnnnnnnnnnnnnnnnnnnnnnnnnnnnnnnnnnnnnnnnnnnnnnnnnnnnnnnnnnnnnnnnnnnnnnnnnnnnnnnnnnnnnnnnnnnnnnnnnnnnnnnnnnnnnnnnnnnnnnnnnnnnnnnnnnnnnnnnnnnnnnnnnnnnnnnnnnnnnnnnnnnnnnnnnnnnnnnnnnnnnnnnnnnnnnnnnnnnnnnnnnnnnnnnnnnnnnnnnnnnnnnnnnnnnnngcttggctgcgttgccatggggatgtggcctggccggcgtctgaggcgggttgacaggacactctggtagcccggccttcgggctttctccagacggtgttatttctcgtatcctctgagaaagttggctgaagaggagcccagcagccctcgaggtgagaaagggtagcgggtttaagccccgcgcctgcgcgggagagggcgcgcctgtccgcggagccgcgcgtgcggagaccggtgtttgctgggcagctagaaattgtcttctcctggttcttcgacggttgacatattcccccacgtttcatctccctgtctacggtttcttcagcaattgcccggaaaaccaccgttcttggtttttttctgagtgcccaaagtcctcttgcctttgaaacacacttcagagcgcttctattccactttggattgttttgtgtacttccggaaacctcgttcttctttttctcatataactgtgaactctgagataagacaagcgttttcacatatcctatacacatagtagacttttaagaaatatttgttcagtcgaatttttttccttcagatttctttttatttgaattagaaacaagattgttttacatgtcaataccagttccctctccctctcctaccccccccccccaactaaaaccctacctatcccataccctttctgctccccagggagagtgaggccttccatggggggggtcatcagagtctgtcatatcctttgggatagggcctaagcctcccctgtgtgtcttggctcaggaagtatccctctatgtgaaatgggctcccaaagtccacacctatgctaaggataagtactgaactactacaggaggtcctgtagatttctgaggtctcctcactgaaacccacggttctgggttctggatcagtcccgtgctggtatcccagctatcagtctggtggccaagagctcccctttgttcaggtcagctgtttctgtgggtttcaccagcctggtctgaacccctttgctcatcactcgtccttctctgcaactggatcccatatcagctcagtgattagttgtgggtatctgcttctacttccaccagctgctggaaggctataagatggcatataagtcagtcatcagtctcattatcaggggagggcatttaaggtagcctcttctctgttgcttagattgttagttggtgtcatctttgtagatcttcagatatttcttctgttcagtcgaatttaactcactacaaatagattctattttcttccatgccttgttccatgcaaagatgatttgggggcaggtggaagagagaggacacactaatctcgtatacaaataagcctgaaaattcagcattgggatttccatcttttggttacaacaactttcctacattgtagtctatctaccaataccttttatcaggctcctaaatgtatttcctcaaaacagaccattctgttgttatataccagaggatttttctctttttatttcttcacctacaactattgtcacattttatctgtgctttgggaaaatgtaatcagttatttgagtttgaatttttttcacttacattacatgtgtgtaccacagcactcaagtgaaggtcagaagacagctttgaggagtcggttctcgttttccattatgttgaggcagggtctgtcttgtttctgctgctgctgtacagcggtctccaggctagattcccgttatgcctcccatttctccaaaagaatgctgggcttacagacgtgcactaccacatgtggcttttgtttgtttgttttttgttttgtttttttttcaagaccgggtttctctgtgtagctttgtagaccaggctggcctcgaactcccgagtgctgggtttaagggcgtgagccaccaccacggggctcacatgtgactttttatgtggttctgggcattgaactcaggtcattaggcttatgaattgtgtgcatttacctaccaagccctttccttggccctgatttgagtttcttttttttttattttatgtgtatgaatgttttgcctgtattatgtgtaccttctttttgtatgtctggtgagaaggaagccagaagagggtgttggatccggttgaactgtagttacaaacacttgtgagctaccatgtggatgctgtgagtagaaccccctgttcttttgaaagaacagccagtgctctttaaaaaaaaaatacttatttattatgtatatagtgttctgcctgcagtatgtttgcacaccagatctcattacagatggttgtgagccaccatgtggttgctgggaattgaactcaggacctctagaacagccagtgctcttaaccgtctctccaaccccattatttgaggtttgtttgtttgtttagttggttggttggtttttcgaggcagggtttctctgtggctttggaggctgtcctggaactagctcttgtagaccaggatggtctcgaactcacagagatccatctgcctctgcctctgcctctgcctcccaagtgctggaaataaagacatacgccaccactgcctggcactatttgagttttttgagatagcatttcatactgtagcacaggcagtcctggaacatgcagtaattctcctgtctcggcttcttgagtgctgtaattataaataaaacatttattatttgttgtatgtgtgtctgtgtgtgaacagaggacagcttttggggagtagattctcttttacagtgtgggtcctggggattggttcaggtcatcaggcttggcagaaagtgccgttacctgttgagctcttttgccagcctttaaaacatctttttttttttttctttgcatttatattctacagagtttttgagtgttttgttttggtttggtttttcgagacagggtttctctgtgtagctttggagcctatcctggcactcgctctggagaccaggctggcctcgaactcatagagatccacctgcctctgcctcccgagtgctggaattaaaagtgtgcattactactgccccgccctacagatggattttttttttatgaccactctcttcagtgtgtattaacagctcagcctctatacattcatcaggtatccataatcctattgtgtttccaggactgtttcattgttaacttgtggcctatatcttcacagtattattgctgattattcttcctaatatgaaattcatagctcaggcttaactttattgaaaggattaaaaatgttgctgggccagctggagagatggctcagcattttaagagcactagctgctcttctggagggcccaggttcaattcccagcacccagatagcagctcacaactgtctgtaactccagttccagggtatctgacaccctttcacagatatacatgcaggcaaaacatcagtgcatataaaataaaaataaataattaaaaatagttttaaagcatgttgctagacaatgatggcacactcctttaatcccagcacttgggaagcagaggcaggagaatctctgagtttgaggccggcatggcccacagagtgagttccaggacagccaggactgtttcacaaagtaaccctgtcttgaaaaaacaaaaaacaaaacaaaaaagaaaaaaaaaagttttgttgaatgaggctggtagtgtggtggtgcacacctttaatccctggatctctgtgtgtttaaggccagtttggtctaaataatgagctccaggccagcagggatacatagagagaccctgcctacacacatacacatacacatacacatacacatacacatacacatacacctacacatacacgcacacatacacatacacatacacctacacatacacgcacacatacacatacacatacacctacacatacacgcacacatacacatacacatacacctacacatacacgcacacatacacatacacatacacctacacatacacgcacacatacacatacacatacacctacacatacacgcacacatacacatacacatacacctacacatacacgcacacatacacatacacatacacctacacatacacgcacacatacacatacacatacacctacacatacacgcacacatacacatacacatacacctacacatacacgcacacatacacatacacatacacctacacatacacgcacacatacacatacacatacacctacacatacacgcacacatacacatacacatacacctacacatacacgcacacatacacatacacatacacctacacatacacgcacacatacacatacacatacacctacacatacacgcacacatacacatacacatacacctacacatacacgcacacatacacatacacatacacctacacatacacgcacacatacacatacacatacacctacacatacacgcacacatacacatacacatacacctacacatacacgcacacatacacatacacatacacctacacatacacgcacacatacacatacacatacacctacacatacacgcacacatacacatacacatacacatccccatacacatacacatccacataccccccccccccacacacacacacacacacgtttaaatgagtaatggagccaagtataacaacataggctctagtctgtagtctgagctgcttgaaagctgaagcaggagaaataccctaatccaagatttgaagccatcctaagtaacatagcttggccaagacctagacctgcagtgctaggggtggagcccagggccttgagcatgcttggtgaatgtttcactactgagctacatcccaaacaagaaacagttttagtggtagtaataacagcagaaacagtagtagtaatggtggcagtaacagttgtagcagtggtggtaataatagcagtagtagttgttgatgtaggttctaggttaaaggagaagaagaaatcctaatatgctttctaattcaggtctgagtggtaccatcacccacttccccaatccaccccccaccccccggcttttgtaaggaaatagcaagtttttgttttgtttttttaataaggaagtgataagttgttgttatgtgatacatatgttcagtcatggaaacatttttattatgatgggctgaagatagagctcaattgatagtgtttatttttcgtgcatgaaaccctaggttcagtccccagcgccacataaaactggcagtggttgtcgaaaatgcttagcatttgaagcagagaaaaaggtcaggaccatcctgggctttaggaatttaaggttagcctgggctacatgagacatcatctcagaaaacaaaacaaaacaatgaaaaacaacaaaaaacatgcagttgtctattttgctgtgaagtgaacttacgtagtatttggcagcattgcataatactggtatttaactagtatctggaatagtgcatctgaaataggccacaatttccagctgagattttaccagcaacgaggagtgaagctctatctattgtagtctatttttagttagccatctatttatgttgacatacattggttctagccaggagcatggctttactgccagcacttgggaggcagagggaggggaagctggggtacagagttccagaataaccaggggtacacagagaaactatgtcttaaaaaactaaccaaacaaacaaaaactagtggtatagattagtgtggccaatatatagctatccactcttttagaaaattcatgtagttgttttaaataaataaaattattcctcactttatttacttgtaaaaaaatgaaagattaattagatagcaccattacatttaataatctaaataaggttatttatttttttaactttaaaaaacaaattgttttttcaagacagggtttctctgtatagccctggctatcttggaacatactctgtaaaccaggctggccttgaactcagagattctcctgcctctgcctattgagtgttgggactaaaggcgtgtgccacctccctgccagcctggaaatttataaagactggtgttatggctgcaaactggcaaaaatcttttaagtgatgacttcctgagattggattagaccaaaattttaaaaataagccactcattttaaagccagcactgattactacctgtccctgggagtgcattcagaattaaacctctgtgtttagagactagtatttagagactagtttagagactgcattgacttaagatgactgggttcagcgattttgttatgtttatttttaggtgattaccactaaacttaaaaacttaagcctattaagggggggtggcctttaagcaaatcacatagtatttatagttaactgtaaatgaactgcaaatatgacagtaattcacaaatcagtgtccaaaaatccacacctggccttaggaattccattgagtaccatctgttgtagttcctctgcagctgttgctttaaacagttgtctcctgtcctttgtcttctgtaaagcttagtcatctatagataggataaccctggagtttgaagtaactggttctcttgagagagaagtatatactgtattgtttaactttagttggcctcttggaatatggaatttcttgtgtgtccttagggatctaatacctaacctgagatacagaaacattttttatggaaagtgattaaagaatgttgagtttatattgtatctgatttttaaggtgcacatgtgtgcttgcatgagcgctggtgtgtgtgtgtgtgtgtgtgtgtgtgtgtgtgtgtgtgtnnnnnnnnnnnnnnnnnnnnnnnnnnnnnnnnnnnnnnnnnnnnnnnnnnnnnnnnnnnnnnnnnnnnnnnnnnnnnnnnnnnnnnnnnnnnnnnnnnnnnnnnnnnnnnnnnnnnnnnnnnnnnnnnnnnnnnnnnnnnnnnnnnnnnnnnnnnnnnnnnnnnnnnnnnnnnnnnnnnnnnnnnnnnnnnnnnnnnnnnnnnnnnnnnnnnnnnnnatacataagcaggcaacatcagagtctaataccattctgtgaattttgatactcactctagggttcctcatgcttactaaatgtccccacttaaaggcagataagcctgaaaaatctcttagcagagatccatcctgtctgcccctgggacagcttctaacaggtgactttttccgagtcattcagtatatatttgtttcagagacttgggtttttttctttttggattgccataaatcttattggtataaatgctcagaaattgattctttttttactagcaactgtcacttaaaaataggtatgaaaaacaatataataatttcaacttgtttccaaagtcctaagaaagaaaaagtaaaatttccacaatatagaaaatctctgtttagtctcaaattatatgattgtaaaataatgactctggctagacctggttgcacatttgtaaacccaggacttgggagtataagaaacattaaatattagtcttcctgttaaacaacgtagaatttttttacaacaaattcaaatcttttgatcttccctaccttttaaaactgaatacaaatgttttaaattccctattaccaccaccacctagctaatagctaggaatttgaatgatttggaattacagtcttggaatttgaatgatttaagtggccttccccatcccccttttcttcatttcctttatgccaattcttttaaagctaactgattgagaaagactgtgaggtcagaccaaccaggaaaagacagtcactacctaagttagaatcaaaaccaagtgcatgccaggcagtggtagtgcacacctttagtcccagcacccaggaggcagagacaggtgaatctctgtgagtacgagaccagcctggtctacagggtgacttccaggacagccagggctacacagagaaaccctgtctcagaaaaaaacaaaaccaagacaaaacaaaaaacaggcacactttctgccctggcatgcatgctcttcttttacaagcagtgcactctttttatccagagtaaagttttgctttgttcagacacttcagttggtgtggcggcctttatttgcaaccccaagcttacttctttctttccttccttcctttcttttttttattatatatgcaacattctgcttccatatatatctgcacatcagaaaagggcaccagatctcataaaggatggttgtaagccaccatgtggttgctgggaattgaactcagggcctctggaagagcagtcagtgctattaacctctgagccatctctccagccccctttctttcttttttgaagcagggtttctctgtggctttggacactgtcctggaactagctgttgtagactaggctggtctccaactcagagatccacctgcctctgcctcctgagtgttgggattaaaggcatgcaccacgactacctagcaccaaacttatttctaacaggaggtatgttttctagtttgaagacaatctgagcttggtgttttttatatggtttcatttctttattttggtattgaatctttgctttgggttatttgttttaataatgttaactcttctgagaagtccatgaaaaagttttttttagtgatttcttccgtttctttcatcaatgttttaatagttttcattatggagatcttaccttccttccttccttccttccttccttccttccttccttccttnnnnnnnnnnnnnnnnnnnnnnnnnnnnnnnnnnnnnnnnnnnnnnnnnnnnnnnnnnnnnnnnnnnnnnnnnnnnnnnnnnnnnnnnnnnnnnnnnnnnnnnnnnnnnnacggagatcctcctgcctctgcccctagattgctggggttaacattgtatagcaccatgctcagtaaggtctttgatttctttgattaaatttattcctaggtattttcttccttctctcccccctttgaggctacagtaaatggaattgctttcttgatttttttttttaagataatttgctgttagcataccaagactatttctgattggcacctcaacagctgggaactaacagtctccagacttccacaaaggagagctccgaatatttgtgttgttggataccaggagagtcagtatgtaaaaaacttgcatcctccctcatcctgggctcactaatttgcacttcatttttctggtagtgacagctgtgagctactccctgcagtaggggtcagctaagggggaagtgactgggcctgtcagtggtagtagaaagagtcagacatgagaagacttaaattccaatcttggatgtcacttgttactctggccaacacacagattcattatggacaagggaggtggagacaggagtgatatggttaggtggagagaggaatatatggcaggaggagacaagagaggcagtctgagatttgtagagatggaggcagtctgaagcagcagtctgtgggagtcagtttgaggaagcagtctgaggaggccctgttggtggaggattctgtagaggtaaaaggtctctcttggggtatctcctttacttctttgatccttcagctttcatcccctgataactgacttcaagtttttattattaagaacaattagaattcatgctacaacttagtttagctttcaaaattctcatcctgtttgtttttttgtgacagggtttctctgtgctgaaactcactctattgacccaactgcctcccaagtgctaggattaaagttgtatgtcaccactgcctgcctctatggctaactagtgtggctaactttaagctctgatcctcaggcaagctttgttaggtcataaaataacaagtaattgtcattttacttattatccacctccttacacacttgaattaaaaatttaccatttaaaagaaattaccattaagggggctaaagagatggcatagtgattacaagcacttaccactcttgcaaagggccacggttcagttcccagtacagatgggattgctctgtttaacagccttggctgtcctggaactcactttgtagaccgtattggccttgaactctcaagtgctgggattaaaggagtacaccagtacctcccaggtcttttaaaaaaatttttatgaatatgtttaagtgctgtatgtatgtatgtgtaccacttatgtgcttggtgctgttggaggacaaaacagagtattggatcccctggaactggagttattgtcagttgtgagccactgtgtttgtacctaggaaatgaatcaaattctccacaagagcagaagtgcactgaactgctggaaccagctctctaatccccagaaaggtggtctaaggagaattccgtaaaggagaggttcagaaagtcaccaatttgcaactcctaataaaataagtaaggaggtattgatcaccaactctcttaacttaaaagaatctctcagcaaggggatcaggctgcagtcctcacagactttgtatatgttctgattcgatgttcatgaaacctgctaaataacaccgacagagcatttgccagaaatgtagatgctgcttctaatgtaggcttgccagatttagaccaaacaaaattcaatttgaatttcaaataagcagtgaatgacttctttagtattaagctctatgcttggaacatacttattttgtctttctataagaagtcagaggaacagaaagaaaaggagatgaagtttgtaccgagagagggtaaatgggactgctttacaggaaaaaaacttaaacataaccatcaagtttgtggaatttgtatggattctgatttttgtaaaaagatattttagagtcagcaagacaacttattagataaaaagatcggctacttggtttcagtcttggggcccatggtggatggagagaactgacccccacactttgtcctctgacctccacctgcataccatgacatgggcacaccacactgccatatacttactaacagtaaatacaaaatttaaaatatattttaaaatgcatattcaaaacatgtttgaactgggaatggtggcatatacctttaatcccatcactgtggaagcggaggcaggaggatctctgtgtgtttgaggccaatctggtctgcatagcgagtttcagggcagcaaggctacagagagagacccggtcttgaaacaaacaaaaaattgatagaaatagactgagtatatagactgagtataaggtaacaaagattaattttacaattttttttttttttggtttttttcgagacagggtttctctgtgtagctttggagcctatcctggcactcgatctggagaccaggctggactcgaactcacagagatccgcctgcctctgcctcccaagtgctgggattaaaggcgtgcgccaccaatgcccggcctaattttacattttataactataataaaccatatataatgatgacattaaaatgaatttacagataaaatttacctatctgcagtttactgtaaaatatttcaaaaaagaaaaaaaatggaccaagaaagcaagtgtggtagattttgataaatgaaaaactacagggtagtttagtaatctgcattagtgttctttggttttttgagagatacttaaaatgaagatctatcttatttaacattttaaataagaatgctctctgcctttacattttagcatatattttattacattctaatttattttgtgtgtagatgtgtgttgcacaggatatgtgtggaagtcagaggacaactttttggaattgattctctcctctcattatatgggccctggagatcaaactcaaagtcgttagactgtacagcaagctctgttaccactgaaccatgttgccaactctccaccttattatttttttttattagttcaagttaggaaacaagcttgtttcacatgtaaaagtcccttcttgcaccagggaaaaatgctaatccacttccagaggctccctggagtgcagaggcctccttattaacatccatgttcagggagctggatcagtcttgtactggcctcccagatagcatctggggtcgatgtgctctcccttgttcaggccaactgtttctgtgggtttctccaacctggtacagacccctttgatcttcattcctccctctcttcaactaaattccagatttcagctcagtgtatttctgtggatgtgtgtctctgcttccatcagccactgaggactctcgtgatgagggctctcgttgcggatcagtcggtggaaaaggaagcctccaccttattttttgagacaaactggagcttagactactggtcagcaagcgttgaggatcctcctttgtttcccaggattgcagacatgttctatcacacctagtttttatgtgggttccagagactcaaactcaggtctccatgcttatgcagcaagcactttacccactgagccatctttctaaccctgaaaagtgttgttttttaattaataatagcatcatggagttggagagatacctcattgattaaagagcacttgctgctcttgggaggacccaggttcatttaccagcacccacatggtggctcataactatctgttaactccagttcctgggatccaatgacctttttcacctctgagggcaccaggaacacacatgtgatgcacagatatacttgcaggtaaaatagtaatattcataatttttaaaagtagtttcagaattaagcacaagcacaacattgttcaatgtcttgttgggtaatggaaaagtcagtgaaatacaaatcacaatagggaaaacaatagctactaacattcattgctgtgtaatagtctacttctcttggttgcccactagtacttacccgttcccctctctgcaagagactactctcatttgtgcaaccagccaaggatatttatgcctgataagcaaagttatagctctattttggatcaattaactttctctttaacaaatgatgcctttatgaactgttctgtaccttgctttattcacttaccgatatattggaaagctttctttttcttcaataaatattggagagcttagttaagttttgtaattgcttcatagtattattccacatgaaagacaactgtaatttatttaaccagtctctgttcctttgctattatcaacagtgatataatgactttgtatttctgtcattttctatttgtacacaatagctgtaggatgtttctagagttagaattgctgggtagtgaatttgcttatgaaaataaatttatttatttacatatttacctgtttgtttaagacagggtttattgtatagccttggttgtcttggaacttgctgggattaaaggcatgtactaccactgcccagctaaatttttatatgtatgtttgcatctgtgtgagtgatatttacaaatcaccttgggaaagacagtagctaccaatacttactgctatgtcatagttgacttctgtatgcatatttctatatgtgcatatacctgtgtagagcagagaccaaaaaacgtcagatgccttagaactagagttataggcatttgcaggttgcccaggttgttatgtggggctgggatctgaactccaggcctctgaacttcattgcctgaacaccaatcactcttaactctgaacagttacctccagagcccagggcctggctcatattaagcatgcactcaactgcagatatccctccacagcctttaaatttgtctttttgacagagatcagtaaagaaaattttcatctgagcaaaattttccatgcatctatcccccaaatctgggagtttattttgtggttttgttggtggtggtttgtttgtttgtttgttttttgtttgcggcttaggggtagagttcaaatgtttttgcttgcagttgcaggagtgattctgatgcctatttcataagttaaaggaggggataaacctctgtaaaatggactgccattgcagagaaacatgttgtttgaaaacaaaggaacataggctgactgtagtgcccacaaaggtgggatggctgcagctgtgctagacgcttgaccatgcctacttaatctgcatgatcaaattactgctatttaaaaaaattattattacattttatcttcccatgatcttataggttatacaaggtttataaaattaaaattttagtctcatttacttattaggaatgcagtggaggctgtgattatcagagttgaactgagaaatgtttggtatggcaccaagggaattggtgtgcaaaatacagaatcttgcacagcttgtgcatagcacttacagtctgttccatgggtaagatgagccaagaagagagtgcagctgcttaggatttgcttaaaccaaaacactgaaggtagaataagttctgttcttggttctgtgctaggtggtgaagataggaaaaatgcaaaaataacaatagcaatggtaataactgccaacacttattaaatatggaatgctgaatgtgtcccagccattatgctgagcttgtttgtctgtctgccagccactcaggcaggcctcagacttgctctgtaaccaagaatgccttgaacttctgatatgcctgcctctaccttccaagtgctgcaattataggtacatgttaccatgcctagagttttgtagtgcttgtgagcaaacctagggctttgtgcttgttagtcaagcatgatataaattgagctccaaccctcaacccttacaagtatttccatattcaatctgaagactttaaggattctattgcctttttccccccattcagtgtcatgaggctaggtgtcattatgtagttcagactgacctcaaactttctacatagctttgttgctaggaccgaccaaattcaaggcagtcctatctcagccttccaagtgcttggattacaggtctataccaccacacaactcacacatgtttgaggggtggagggatgtgcacatacacatgaagtcaacaatgagtgtctccctcagttgttctccagcttttcctttttttttctttctttggctggccggtgagttccagagagcctcctgtttccacctccctagcactgacattacactcaaacactaccacacttagctttttttgtttttggagatcaaattgaggtcttcatgtttacaagtgagacacttcactaactgagctgtctccccaggtcccagatagctttttaacaaacaaaacaaaacaaaacaaaacaaaaaaattgggtttcatatagcccaggctgttcttgaatttgcaatgatttcctttgtctcatggttgggatttcggatgcccagcttctatggcattcctaattcacagttggaaaaaagtgagtttttgaaacattaagtgattttaactttctacacacttacctcctttataggattgcatggagatgaacaaatacagtgtccagaacagtgtctgttatgtattaaatgctcagtaaagccaggtggcacaagcctttaatcccagcgctcgggaggcagaggcagacggatctctgtgagttcgagaccaggactggctccaaagctacacagggaaaccttgtctcgaaaaaccaaggggagggggagaagctcagtaaataccagatgctgttactgaagcacagagtaccatgtattccctgttagggcccatctctttcatgatagaaaaatacagtgtccttctagcaaagacaggtattctagggaagaaaaaacagtaataaagggattggttggtttagttttgatattgtataatgtgttgggtataaaatgatagaaaaaaatctagatgaggttggagacatggctcagaggttaagaacactaactgagagcactggctgctcttctagaggtcccaaattcaactcctagcaaccacatagtgactcacaaccatgtataatgagatcttgtgccctcttctggcctgcaagcatacatgcaggcagaacactgtacatgtaataaataaatcttttcaaaataatctagagatgggactagagagatggttcagtggttaagagtactggctgctcttccagaggccctgagttcaattcacagaaaccacatggtagctcacagccatctaatgtaattttctgtcatgtaggctctatatgcaccatatacataaagtaaatcttttttaaaaatctagagatgaaaatctcattttgagggaaagtccttgagctgtcttgaaaggataggtgtagcccacacataatgacaaatgatgagaagtaactggcgttctcattcattgcttgtagaaatgaaaatagtacagccacttaaggagatagtttggcagtttcttataaaactaagcatttcttatcatacaatccagtaatcatgcaccttggtatttatataaaggagttgaaaattatgtccatgtgaaactgcagagatgtttatagaagccttattcataattgcccaaactgtaagcctctaagatgtccttcattaagtgaacaaataaataaaccaggacacattcacatgtgaaatgggtttcagcagtgaaaataaatgagctaacaagccatcagaagacttggaggaaatttaaatatgaaatgaaaaagccagtctaaaagctgacatactgcatgcttccaactgtgtgactttctggaaaaggtaccgtggaagcggtaaaaagatcgctgggcaggtatggggttcacacctttaatcccaacacttggggaggcagtggtaggccgcagtgagttgaaggccagcctgatctacaatagtgggttccaggatagacggtgctacacagtgagaccctgcctcacccaggatttttagggcaatcaaactagtccatgtaaccactgtcacataatgatctagcccaaaatttggtggctcaaaacagttgcccttttatttgcttaaagctctgtgagtcggttatttgggccaagcttagttaatagctctttacttgatctcacctggagtcattcctttggctgtgctcgtctagtgcattggttcttaacctgtgggtcttgaccctttggggcctgggggaggtcaaaccattcttttacagggatcacataaaactgtcagaaaacacagatatttacattgtgattcttagcagtaacaaaattaaggttatgaactagcaacaaaaataattttatagttggggtcacacaactggaggaactgtattaaagggtcgcagcattggaaaggctgagaaccactaatgtaatggcaccgctccagttggattgtctaagatggcttctcttacacatctgttttttgccatcgtggtggtagtggtggtggtggtgtatgagctcctggctattggctaaacttcttcacatggcagtagaagtctaacaaatgtaaaagctatgatggctctctagacctaggcatgacagtctatttcatggcattctgttgccccccaaagaaattagaaagctattctagatgcaatgtggggaagaaatagactccacccttgatggaaggactgtgaaacttttgtggacttctgcagaggggaaacctatcactaatagatgatgtcaggatcagtttaggatatgttactcggaccctttggtctttctttttgcctaaatagtattttctccaaatttaattattcagagctctttggttgcccttgttatcctgtctttaagcttgcatacacacacatacacatactgttcctcttaaaaaggacaaaaataaaatgaaagcaaattttgaataattaattgagttttgaaaactccgaaggaccaaaccattttgaaaaagaaaatataagtggctggagagatggctccacagttaagagcactagctactcttgctaaggacttgggttcatttctaagcacccacatgacagctcacaacttcagtctgtaactttagtcctaagggatccattgccctcttctgacctccatggacatcaggcacacatgtggtgcccagaaatacatacagacaaaacactcatacacataaaataaataagaattttagaacgttaaaaaaaaagcataaaactaggcatagtgatgcctgcttgtaatcctagagattgggagaccaaggcaaggggatggccataaatttgaggccaacctggactataaactccaaaccagcctacactctattggctatacaaaaacaaaaaaagacaggttgggtagtgcacacctttaatcccagcacacaggaggcagaggcaggtggatctctgtgagttggaggccagcctggtctacagcatgagttccagggtggcccaggctacacagagaaaccctccccaaaacgaacagaacagaggttgaggagacagtgcagtggttaacagtgtgtacaagttcttctagcatttcatctccagggatccaacgctcttttctggcactgcagttgtatacatgtgcaagcagttacacacagacacacacacatacacatttaaagtattgattaaatattttaaaatgcaatttaaagttttttttaaaatattcttaggaacttgagcttgattaacaggaataatggagaacaattcagaattctgacttataatagacaaaaattttgtactaccacatcacctgttagtgtttagttaaatttctgggtttgattattttattgtatagctgtttaagttgtaactgtagtactaatttcttaggaaaattatttgactggtattctgttcaggtagacatgtgtgaccgaccaccttttagaattatctgaaatactgaatgagttgattctgaattggttgtttttacttctatctaacttaccaatacacagcagataaaaatgcaattttctctggctgtgttagtttattatccttgtggttgctattttattctgctttctattctgaaagactccttagactttgttcattaatcataggaaacagttgtgcagcatgccttgacattgagttgaacatctaaaattagtcctcctacaatcagtggttgagaacaggatttcatcagtgtattgcctgtgttaagtagacactgctgagttagaaggaactcccaagcaataagtaagtgatttatgttatgtctgtgtccgtttatttacttacatgtataattaggaaacattattaaacagatgaacaaattgcaacttgttagctcatatgctatatataaaatagctttgcttataaactctgctgtttaatgaatcatttcagaagaaacatacctaggaaacttgagatgataaacatttttttgcatatttgtcaatgttttaattttggggttttttgtttgtttgtttgttttcttttttggtttttccagacagggtttctcctctttgtagctttgtagaccaggatggcctcgaactcacagagattcgtctgcctctacttcccgagtgctgggattagaggcatgtgccactactgctgggcaatgttttaatttgtaaaggaatatgttctgtttactctatacagatgacttctttttctctttttcttcagagttcatataaatctagtcacaaaaatggcatcctggttatatgaatgtctttgtgaagctgaacttgcacagtattatcctcattttactgctcttggccttcagaaaatagatgaattagccaaggttacaatgaaggactattccaaattgggagtccatgatatgaatgaccgtaaacgtcttttccaacttatcaaaatcattaagattatgcaggaggaagatgaagtcctcaatagcccagagcatcctcttcagacaagcaacctgtacaacaagcctcaggaatttagatctggcccccgaagacaactgcattttgattctcctgctgatagcaaagccagaacagccagcaacgaagcgtgcaacttatcagacttctctgtagaggagcagaagtccacttccctgaaaatgctgggacacatgctacctgatgactcccaggaccagacaaaaataagaaccctgaatgcctctgctgctgctgcttatatgcaaacagaaactgacactccactcttttcatcaaattacttttctccaaaactaggaaatggtgatattcctgttattcaaagagtctctcatgttttggggtataactatggaattcctcattcttgtgtcaggtaataatttgtttttacatttttgggagaggcaaagacaaatctctcctttgtgaccagaggaatataagtactctttattcctagtaattgactgtaacatagttagcaagttttgcattaataatcaaggtaagtgggtagaagacagaatagtgaggaaactggagctttccagataaacaactactgctttccagggtctgctgtccatgtaacatgatacacctagtatattcttgaaagcaaagtagttaactggccttctacaaatggaaaaaaaatcacacaagtcacaggattttgttttttgagacagggtttctctgtgtagtcctggctgtcctagaactcactctgtagaccaggctgtcctcaaactcacagagctccacctgcctctaccttctgagtgctgggattaaaggcatgtgacacaaccacccagcaggatgtttttttaaaggccatcaaattcatgagtcagatgccctacagcttacttaaggccagagacaggtagttaaattaagtagttcttaaatcatctgtacaattgaaataggttcctgattttgactgcgattttgttttaaatccaaccctgggaaaacagataggttttggtaattacaaagagtaagaccttttgatcgcaatcagaggttgtgaatcagaatgacagtaagctattttcacctagtacttcaagatagaattttaaataagatccctgagaggtgaaagactcaatagtccccaaatgctaataatgatataatagaaaatatgttttttaaaaatatattacttgttgtattattatgaaagtaatatatatgagttatgagaaaataaattctctctctctctcttttttttttcttttctttcttttttttttttttttgagtannnnnnnnnnnnnnnnnnnnnnnnnnnnnnnnnnnnnnnnnnnnnnnnnnnnnnnnnnnnnnnnnnnnnnnnnnnnnnnnnnnnnnnnnnnnnnnnnnnnnnnnnnnnnnnnnnnnnnnnnnnnnnnnnnnnnnnnnnnnnnnnnnnnnnnnnnnnnnncattggtcttatattgggtaaagttccccaagtatttcatgatcagttcttatattctcccaaactagatgatttaggtttaaatttttttttttattttatgtgtatgagtgtttcacctgtgtgtatgactgtacactgcatgtgtgtccggtgcccatgcaggccagaagaacatgtcaaaaatcctaggagtggagttacagataggtaattcctgagccacatatgagtgttgggaattgaacctgggtcctctgaaagagcagcccgtgctcttaaccactctgccatttctcctgttccaaggtgacttagttttataagtgaaagtacctatagtaatttgaaatacttgttctagcagaggacagaggacttagtactatttttcttctttaattatagattgtaaatatgaaaggtaaaggagagcaaacttttttttttactgtcttttattgaacaacacagaaaaatataaattagaattatttatagaaatactactttccactggtttaacacatcatggtttagaatgtgtattttagtgtaaatattgccattacatttattttacaagtattaagtaatagctgtgatgtctgactctaggtatgaagataattaagatatctgcaggctcttagatgttagggggcaggtaagagatgacagacaaacataaccatttgtgccaggcatggtggggtataccagcaaacccagcactcacaagacagacaagaggctaatgagctccaaccagccttggccacataggaagaccctatctcagaaacaaactaaaaggtacccactaggaacagccagccttggtcacataggaagaccctatctcaaaaacaaatgaactaaagggtacctaaggaaaagagcacactttgctttttgcctcttaacttaaaactcacaaactatgaacctttgtccatgtgactcatcctggaatccctagctgggcatattagtactgtgtgatcctagcactgtggatgcaggccacattgcaagaccttctctcaaagcctaaaaaaaaaaaaaaaaaaaaaaaaaagaaggattaagaattttgtagcctctttgattagtgtcctatgattaggttattaatgctaagcatctagagattttgtcccaaaacactgttaaaatagtggattagagtaaaacataaaacaaaaagtagattttatagaggaacagataataatatgaaaccaaaaagtagaatagattacaaaataataggttaaaactttcttttttttccttgtgaaaaattaagcacatatgcagaaagaccagtaaatccccatatactcatcatcaagtctcatgcctcaaatgatgcattagtttcatattttaattaaaatatgctttaaggtgtcttaaaatcatgcactatttattggaaattttgtttcttgtaaaaattaatttagatcctggcaaaaaataatttttcagccagttggaaggctcagaaaatcagaatttatatgaagcaattaggtaactatatatttttatattagattttttgtaaaatctattattagagtttctgaaaggggctatcaaattttatagtgtaaaggagggaacaatttgtcttgataatgcatccttttacatagaccaaaactattaatcctgataaaaatacctgctttcgttgggtggtggtggcgcacacctttctttactccctggtagaggcaggtgaatctctgtgaattcaaggccagcctagtctacaaagctacacagagaaaccctgactaaaaaaatcaaaatcaaaataataataataataataataataataataataataatacaagagacaaagtgtacataaagcaagaaactgctcctgccactgatctaaattagttaaagagcccatatgagttcagaatgtcctttctgatctacagaggaccagagatgcaggagtggggcatggggaacccatgacagcnnnnnnnnnnnnnnaaattgttctgagaagaaatacatggttatcagggtggggctaaaaaaaaaagtaaggaggctgggaaaatagttcagctgataaaatgcttgccatgcaagcataaggacaagttggatctccagcacacactttaaaagccagtgtggtatgcatgattgtaatcccagcactgggttcatagagacaggtggatggatctttgatgctagatgccagtgacaaattctgtctcagaaaacaaagtggctagatcttgaggcaaaatgacacctggtctacagaggtaatgccaggaaagctacacagagaaaccctgtctcaaaaaaaccaaaaaataaaataacagagtttagatattagcctttttcttctttggggggcaggataaggcaaagagtgaggtggagtaggtaagagatagaaaccagaggtttgccagtaaaaactttctcattgctgacatttaatatggaattgtttaaatgagcttggtggggtgatgtaggcctataatctcagcacatgggaggtgagggcaagagaaacaggagctcaagctagcctgcactacaacagcaagaccttgtctcaacacttgggtttggtggtgcacacctgtagtcctagcccttgggaggctagggtagaaagttagggccagcctgggcttcatagcaagttctagatcagcttgagctacaaagtaaaaccctgtcttaaaaacaaaaaccacaaaataattatattaaatatactcaaaatttgctgacactttgaccatttaaatagttgaatccttttattaaaaattaccgtctttttgtaaacatatatcagacagattacctcagaaaatccttggactgaaatggagaaaatcagagtttgtgttcgcatacggcctaggtgtgagagaagtacgtcgtggagaagttaatattattactgtagaagataaagaaactctgcttgtacatgaaaaaaaagaagcagttgacctcacacaatatattcttcaggtacaatcttttacttactgtgttgcaaactactattatcaagtatgtcagttttctgctttatgtttaaatggttgttttaaaacccagcttctgattcaggtattttggggggggggggcagggtttctctgtgtagttttgtagaccaggcctgcctctgcctcccaagtgctgggattaaagacgtgcgccacctaagcccggctccaggtattgatttttttaatgtttgtttattatttattttgagacaggctcttaacctcctttagaacttacagacatctggctgcctctgcttaccaaatgctgggattaatggcatgtgccactgtgcccagctcttgatttttattctgaattattgatactttgggccttcattctttaaaaatgtagtgtgattacggtatacatagttggaaaactataattcctgcattatgcaatgaagatctacaatagattcacttaacatgtttatgtgaatttttaaatattttttaatgcgcattggtgttttgcctacatgtatgtctttgtaagtatgtcaggtcctttgaaactgaggttacagacagctgtaagctgccatgcaggtgctgggaattgaactcaggtcctctggaagagcagccagtgctcttaaccactgtgccatctctccagcctgtttatgtgaatttaattatgcatatttagcaaaatgaagggcacaggagagagaataaaaaataatttaactaagtagagagtgatggtcacaaacttggtctcctttttcccctgcatcatgcaatatgaacattttggtttcttttttgtttcgttttgttttgtttttgagacaagatttctctgtgtaacagctatcctggaactcactctgtagaccagactggcttgaaactcacagagatcctcctgcttctgaacctgagtgctggggtaaaagtgtgtgccaccactgtctggctgcttttgctttcttgctttgtttgtttgtttgttgttgttgttgttttcttttgttgtttgtttttgagtcaggatctcactctgtagtcctggctgtcctggaactctcccagggtggtcttaattcataaagatctgcctgcttcttcctccctaatgctgggattaaaggcatatgtcaactgagctcttgtttgtttttaaacaaaatctcattatgcagccctggttggcctagaatttgctagacacacgtagactttactaggcataccagtcaaaacttgaatttgcagttgtcctcctgcctctgtctcctgcatgatgggattacaggcatgtgcttttcatgctcaacgtcactgtcagctcagtggagtattgttgagggcagggtatgactctgtagtccaggctggcctaaaaataaaacttgctgtatagcccaagttggccttagaatatttttctgactgagcatactgagtgttgttacaggcaagtatttttatgtccaactcttgagtaatagtcttgtatttcattatggataatatgttgttagggatatgttcccacatttaatatgtaagggtttaataaaatagtgttcagacacaaaaaatttcaaactgtctataaaaaaaggttggtgttgaaaagaatttattctaaggttgtaccaattctcatagagaaacaacaaactctacaaatgagagaaagtcatataatccatagtatgttaagattttggaattttaggggctaaggaaatgactcagtgctttcagtactggctgcacaagtgtaaggagctgagttcagaccccagcatccacataaaaagttgggcattgtggcagatagctgtaaccccagtcctgggagatggaaacaagagatctgctttctgactagtatagtttattgatgaacctcaggtttagtaaactatcctatttcaaaagatgagattcaaagtgacagacagactcctaacatcaatccctggcctttccatgtgcacgaataggtatatacacctgtatgtacacacaaggactttggaacgcgtaatttccgttactatgaattgccttcttaaaagagtcttccttcataaacattcatattgaacattggttctttctcttgttcttttgcaaaaccctgtgactgataatgagaaaaaaagtgtggtgattaatgggatgtgctagcaattcaccttagtcagctgagatattattctattgcagtaaatcctgtaacactgaagtcaaattgtagaaacttaccccttcttcaaacttgcattgttcttccaaaaattgagtttcacagtgacatttagagtaatccaatagtctctctatgggcaataaattactaggccacagtacagccaacccaatcattttaacagcttcatcgattgttgatcaatgcacagtctattaggtttcagtgggagatacttacattgaagatagtctaaatgaccaattagttgtaaggctagttagttccacagctactatagccagagtaatcgctctgcccgatcaccatctgcccaaggcttccttaatgatgcttcagtcacagtaattccctccaagagtcatcatattatcttttgtatttttccattatccccaaacacaataaccttacttctttgtcactgccattgatcaacatttatcgaatacccatagatcccatggcattttctctgctgttgaactttggacctttgatcttataggtcagagtccttatctgtcaatgctatgatataaaaatactggatttacatcctctcctttttttccttcctcaaaaagaagtccatatcgaacttggtgctaaatgaaagtgatcctaagtcctttaggttttattttgaaacttaactcagggagtaaaacagaaaaaatgtatatgtagttaaatatcctatctccttcaaatcaagtatatctgccacttatccattaaaaattttatacaagtgtagccaggctatggtagtgcattgagaggtagaggcaggcagatccctgtgagtctgaggccagcctgtctactgagcgagttccaggacagcctccaaagctacatagaaaccctgtctccaaaccccctcaaaaatttttatacaagcacaataagtaaaagcaaaattattttcctttccaaattattttttgttctattttctccttttgttttacttttacagccccccccataatagaaatttaattcagggcctcatctatgctaggaaaatattttaccactgagctgcatcccaagatcttccctactttccagttttaaaaaattattttatttacatatttattgagggaatgtatcacttcctagtccgctggcttggaatttcctttgaagcccaggctatatacttgtggtcctcttgccttggcaactcaagttctgagattacaggcgtgtgctacaatgccttcttaatccttttcaatttttagggctctagggagttggctaggtgagtaagagcactcactgctcttccagaggatttgagttcaatcccagcacctgtgtcaggctgctcacaacaatgtataagtacagttccaggggatctgacaccctcttatggcttctttgagcacccacactcatacagtagacactcatatatatcagtaaaaattaatttgtacagggactctaggacttaccatattggcaaaaggcctgtgctttttatttcattttggttttggtgtgtgtttgtttgttaagacagggtctcactatacagccctagctgttctagaacttactctgtaggtcaggctcacctggaactcacaagattcccctgctcccaagtactgcctcccaagtactggcattaagtgtgtgccaccatgcctggcagggctatgtctttaatttcataagacaaaaaggaatacattctcttttccagaaaggcacttcttgtggttcattgattgagttttttagggagaggtgagtaggggtgagacaggatctttcttaccatgtagccctggctggactagacctcactgtaagagtaaactagccctgggtttaatccacagcaccacataagccaggaagggtggtgcagtcatgtaattctagcacttcggagacagaggcaggatagtcacaagttcaaggtcatccttgactgtatagcttcaaagtcagcttgggacacacaaagaccctgtcccaaatagtaataacaataatcaaacagatccattaaaacaaaaattatgactttcccaatagctaaataattaatagctaactcagtatcataagacactgaagatggggcaagtacaacaactatcagagtgcatattcatttatttcacccatactttctcttaaagctctgctaccagataggtcatctgtgtatttgtgtagatcaaccccttcaggcatggggtaggataatgtcttatctttgggctcctgcacactcctgttagaatatacgtccaccagctaacagtggatgtttgtggaactacaagttaagctatgtaacctgcagaatgaaaattgatctctagaattcacacacattttccttgcttggtctataagataactcttatagaattcatttctctcccagaccaaagaggattgactcactcttgccttcatcagtttacttctcttaagagaaaacaaaagttgtctactttagttgttacactgtaagaacatgtaaggacaaaagtggaaagtaaagacagtcatttaacagttactagttattcgtttttctgagtttattagtcagttactattgctttgaaatgtgtttcctttttcccatgtgttaatagaataatggtggtgaaaatacaaatgtatttctataaaaatcaagtttatttttcagcatgttttttattttgatgaagtctttgatgaggcttgcaccaatcgagacgtatacctgaagactgctcacccactcattcagcatattttcaatgggtgagacagattgattccttctttttcttttagttttctgttctctataaactgtgttcctttactaatacgtggtgcttttctagttcttttgaattaaatataaatttatgttgtcacctagatttaccaaacattgagaaatttgctacaaattttccttttatactagagagattgtttctctgcttcctaggaaagtaaaagctctcaatagtttagtttgtcagtatcttcagaataaaagatgtaagtggttataattagcttgaaccttggcatctttaagcacttgggaagctaaagtggaaaaatagacacaagttcaaggtcgacctggtctacacattgagctccaagaactctaggccagcccggattatagtgatagctgggannnnnnnnnnnnnnnnnnnnntcattttttcctacatgtaaagcaagcattctacaaactgagctatatctctagctcaagttgtgtttaaagtccttatttccttatattcaatagttatcttatgtagtattatcagttctgtaaaagaattcctttaagaaaacacatcgtgaggctggagagatggctcagagattaagagcactgactgctcttccagagagcctgaatgttcaattcccagcaaccacatgatggcgcccaaccatccattatgagatctggtaccctcttctggtgtgcagatatatgttatatacataataaataaataaaatcttaaaaaaaacaaaataacaaacaaagaaaacacatcatggtctgaagatatttttactttttgtgttttcataatataagcctttttatagattcttcttaaagaattatatgctagatttcttcaaagagtctgtttcttcctgacttgtttttaagcatctctatgtaaattatcacttctttaaatatttataagtaattctaattatttttcccccagaggcaatgccacttgctttgcatatggacaaacaggtgctgggaaaacctataccatgataggaactcatcaaatcccaggattgtatgctctggccgccaaagacatcttcaggcagctgaaagtatcaagaaggaacctctttgtgtggatcagcttctatgaagtctactgtggacagctttatgacctcctaaatagaagaaaacggtactagataagagtgagatgctgttctacatgtacatcactgtttgagccagagctccacagatcactctgctcacatgactttaatgaaaggcatttttgtgaaatgacagtttcctgcatgggatgttctttcttccccttccttcccttttctgctttgagactgtctgacggtacagtcctgtctggtataaaacttgctgttttgtgtgtgcaaccttgaacttgtgatcatctgactcagcttcccaagtgatggaattaaagatttgccactaaacttaacattctttaaaatgttaactcagctagagaaaaatgtaaattagccatccattcatatctttttggtgctggggattgaacccagcattttacatatgtttgcaggcattctgctattgagctacatcttcagtttccattagtgttttttagaagaaaaaatttagtatctcccaagactcatcccccttttttcctgtgaaaaagattttagtttagaaagtcaggaaatcagcatctatttaaatattttccctttaaataatgttagtgtaaacttaatgacggttttctgaaattggcaaaaagatttctcttcaatttcaattcagttttttaaatttatttttattttatgtatgtgagtatttagcctgcctatatgtctttgaactacatacatgttttgtgcctatggaggccagaagaggggagggtatcaggatccctggaactgcaattacagacagttagctgtgctgtcgtgtgattctgggaatcagcctgaggtttttttgtttttgtttttgttttttttctcgagacagagtttctctctgtagctttggagcctgtcctggcactcgctctggagaccaggctggtctcgaactcacagagatccgcctgcctctgcctcctgagtgctgggattaaaggcatgcgccaccaacaaccggctcaatctgagttttaaattagattttaatttctttattttgtaggcacatgtgtatgtgtgtgtatgtagatatacttgtgccatgatggggttgtggaagtcaaagaataatttgtaggagtcatttctctctctactgtgtgtgtctaagacagtggttctcaaccttcctaatgcttccaccctttaatacagtctgtcatgttgtcaggaccccaaccataaattagttttgttgctacttcataactgtaattttgctattgttatgaattgcaatataaacatatgtgttttccgatgatcttaggtgacccctctgaaaggatgattccatcctccccccaaaaggttgcgacccacaggttgagaaccactgacctaagggatgaaactcatgattgtcaagcttgatggcagaagctgtcctacctccaattgctcttataacctaaaagtaatctataagtgtatcggtggcctattatatatgtttctagaataaacatgtgacttaaactgaacagcaggcaacaaggatgtgaagggatctactagctggagcataggaaggtgaaggaggactgtcacagcagggtaaacaaaccctggcccatgtggggaggggtgagtggaagtgaagtgtggtggaaagctagggaaggtgtgcaagccgctgtggaggtggccaatgtggcattcaggttcatgggtgggacagttcctgttgagtagggagaccacaatgggaaaggctccagcagggagggcactagggttttaggtagcataactgaagaaaccagcagtgtgtgtagacaggtcattgcattgttgaccattccaacaaagatctatgctggtgtgtcacagttgagagaaaacacagtgttcagggttcatctctgaaacataactgtcaaatgaaggtagtgctactcagtgaatactttggacaagagttacttttctcattcaccatctttgtagtggcgtttaagtctctatgtagctcaattgtggcttttctgtcaaccccaagcaccctcattaaaagccctttccaagtggagagtgtagttgtgtggtagaacacttaacctgtgtaaggccctgaattcaatcctccgtataaagagagacagagagacacaccacacacacacacaaacacacacacacacacacacacacacacgagaaagagagagagagagagagagagagagagagagagagagagaaatggtagcacagaccttgtaatgctaacacttagcaggctgagataagaggatcacattttcaaagacagcctggactacacagtgaaactttgccttatctcctaatcccctcaaagctctctgtagtcataatgcctacttcttttcagtaaaagtcactattgtacatgtgattgtgtgtgtgtgtgtgcacgcgcacttgtgtgtgcatgaactcaagtgtgtcttatgaagagactatccagctgtttcagaatataactctttaatgaattatctaaattacatagtgagaccctgtatcaaacaaaacaaaaatatgtatcaggactccagttacaaaaaaccccagccctatactgtatttagagaaatcattgactcagataacttggggctaggaaggcctcagggacattctgctccttgctcagggatataacatggttaatttgcatctctctgttctacctctatttgctaccttcatcctgaagctagttcttgtagatagagaatagctgctgctgctcccaggacttcatgttttctcttcaagagagtaagtggagaccagagccgtagttgattagacagcaaagatcctgcatccaccattgcactgattactagccaggactgtgccatccatggtttggaatatatatgggttttatgttcattctttttattttaatcaagatactgatttgtttacaacaaggaaggaccaccatggtaatctgaaggtagggctggggaggggaagcatatccctcccatccaaatggcaaaactatgtaatgggacattcgtaggttttgagaaagcaagacaaccacagtctttctcatccacaggctttttgcaagagaagatagcaagcatgtggtgcagatagctggccttcgagagctccaagtggacagtgtggagctccttctacaggtaattcattcttcctccttacaacacacagcagcctcagcccaggggaaacacttcattttgcttcctagcaagtgtgatggctcagataaaggtgagggggggaagggtgtagtgatgccactcacatttgtgaaatgtgagccaccttttgaagttagcttatttctccagtgtcctagagtgggagacagcttgtggcagaaacaaatgcatggcaaagatgctcttgggccagtttcaaaggctgcaattataatttctgtggcagtgggcttaggagaaggctgatagaggcaagtgttcttattttaaataaaattttaataagcaatactttcacatgctctcaaaatccaaagaattggaaaatacctgtttcattccctgctcccaaggcaactaattttattagtttttgtgtattcttccaaaggatttttgaagtgtactttattaaaaagtatccatttattataacaaatataatatttgttcactgttaaatctaaacattacaaaaatacataaagtggtagaaagtaagagccctttgagtctccttaacacacagaaacagtctctgtgatatccactattaattgattgttgcttttttcttgtcagaggtcatttattgatttatgtacaaatatatttctagtgaaccttcttttattgatcctcaagcctggatttcttgggggagcagatgctggggatcaaacacaaagccttacactaacaagcactctgccaccgagctctgggctatcctggctcaaccccagctttacattagatcattcatggcccttttctttgcttaaaaatatagctttttttaataaaaatttattttgtttttttttttttaattttacatgtcaatctcagttctccctccctcccttcatgctgctcccctcatctcccccttaccccatcccccatctgctcctcagggtatggcctccatggggagtcaaagcagtctgttggatgaagcctgactaaggtcttccccccagtgtctaggctgagcagggtatctctccataggaaatgtactccaacttttttttaaataaggtcatatatagctcaagctggcttccaaggatgaccttgaacttatgatcctcagatctcaagtaaaatgattacaggtgtgagccatcatgtctagctctttgtttgcgtttttgtttgagacaaggtgtctatgtagtcttggctctcctggagctcactatgtagacctggcttgtcttgaactcacagatatccacctgcctctgcctgccaagcccagggattaaatgtgtaaaccaccacaccctactctcattatgttttaatgttaactgcaaatgtttactgaacagttaactatctaacagatatttggtgagagatttttccccccaaatatgatgtgattcatcaccttaaagtaagatctgtattataaagcttatcttccagatgagcaaactgaagctaaaattggaagctggtcatcagagagccaagggctgaaagagccagcttccagctcagatttatcaactctgaagcaccgttttaaccatacttcattatctattgaggattattagggatcagtttttcttaagaaagtaaaaacaaatattattcactgaattaatacatttatagcagtgtcttctgggttgtttgcttaaaatcgaacatttacagactgttttaaaccacaaataatagggtgtttggggaattttgttactgctttttcaaaacaaagtattaaggatctgctggtagactggagacatggctcagaggttaggagcactggctgttcttccagaggtcctgagttcaagtcccaggaactacatggtggctcatctataataagatctggtgccctcttctggcatacaggcatacatgcaggcagagcactgtatacatagtaaataataaatcaatcttttttttaaaaaattgctggtaatggtggtgcatgcctataatcctacacttgaaaagctgagataggaggatcataaaccaggccaatctgagctgtataatgagacaagaaaaagaggggagctgaagaggagacttggttgtattgggctggagagatgttcaacagctagacaggtcgcaaacacttgtaattccagtttgtgttagatccaacacctctggcctccctgggcacctgttctcaagtacacatatgcacacacagataaacataattaaaaataaatcttaaatactgtgtgaaatggtgaggcaacttataattaataataccttagtttctaagttttttttcccaagataaatagttaggttttgctttctctgagggttgagcatatttgtgtgcttgggatctgaagacattcctgtgtcttgggatctgaaatctgaaggaagatagcatctgtgtggctgttgtagcagataaaagcccctttgtacccgttacaaaggcaggcacagaacaagctgtccagaatgccctctgctatggagttggaaggaaagtgtttctctcacatgtattttttgtcatcttcttgccctactttccccagacattccttgaggagtttgaggtgactctagtctttgggattcttaaatggggaaggaacaaacaccttagggaaatctcttttccatacttggagccacagctgtgctatttcctccctgcaatgctacggatcaaacccagggccacacacgtgcttagcaagcactctgccaattgagctacacccccagccccacaactgtgcgtaaagggcagtctgtgtcacatgagcctttcctggaaaagtatatggcattgtcttatcctaaagtactgttccttaaaaaagcatgaagatttttgttaacttgctactgtttattgtcattgatccccctagtctacaaaactacaatcaggaagacatcagagatctaggtagaaagttagaatgaattatgcatacctgatacagttactctcataaacatttactgactggaaagcacagcacttacttacttaaatgttacacctactctctcagatgtcattgttggtgccactcaggtgtcacccatgtgtttgttcaagtgtcatcttcaagttttaccctcagttaacgctcaggctcactccagcatggctacccaatactgctggcacaactggcagcttcatttttcaaacaggattctcctttctcccagaaatttacccttccaggtctctgactaactcaactcaccagtgcagacaccaggactgaactaactgccttgacatactgcccatatatggactcaagatttttttattattcttaaaaaaaagaaaaagaaaaaaaagaaaaaaaactttgtttaggggagctagagagataactgggaggttaagagcactggctgctcttccagaggtcctgagttcaattcctagcaattacatggtggctcacaaccatccattaataagatctagttccctcttatgccctgcagacaaacatgcagacagaacactgtatatataacaaatgaatctttaaaacaagaaagaacctatttatatttattttatgtgtgagtgttttacctgcatgtatctatgtgatgggaactgagactgtatcctatgccagaggaacaagtgcttatctgctgagccatctctccagcacctcaagattttgttgttgtgttttttaaattaattaatttttttttggtcagtcaattagggatttccggacttaaatcattccaatcgtttttttattttttaaagatttgttttggggggctggagagatggttaagagcactgactgttcttccagaggtcctgagttcaattcccagcaaccacatggtggcttacagccaccttgaatgagatctggtgccctctgctggcatgcaggcagaagactgtatacataataaataaataaaaatctttaaaaaaaaaaaaaaaagatttgtttttggggttggagagatggctcagcagttaaagagcactgacagctcttctagaggacccaggttcaattcccagcacccacatggcaactcacaactgtcttgtaactccagttctagaggatttgacaccctcaaacaaacataggcaaaacaggcaaaacaccaatgcatacaaaaataaattttaaaaaaagatttattttcatttatgtttatgtgtatatttgtgtgaatttatgacgtggttgaaggttcccacagaggccagaaggtatcagataccttggaactacagttacagaggagtgcaagtctccaccccttgtgtggaagctgaaaaccaagctcaattctcttcaagagcagcaaactcttagccaccaagccatctctgtagcccaataactactttatatagtcaggtttttttctcaagacttgtgatacctgctcatatttttatcattgctttgtgaagatccatacaggaagatgcatccttggtggatctcagttgtgtatggaaggtagagactgtacacagtaccactgcttctcagatcaaggatggcatgcacagtactgtgccagaattttaaaaatcagggtatgtgaacatattacttgcttggacactgggggcctgagacttatcctcccctcctccactcctttgtggccaaaaaatcccacttagccttgactcccaggcaaaggtaagggagttctggagtcaagggaagttacaggcacatgaaataactcacttccctgttcctgaatatcaggtttggcctccttcatgcctgcatcctggtagagcaggtggatgtgatcagtcattctgtgatgtacacttctgtcctttgcttcagttactaagctagatgaatgctatgagaccttgctctgagccaagttttgccctggggatcttagttaggctagatccatcaaagatattaaaaagagtgcataagattaagaagtagattagctcttgagccattgaatgttctcccacaagattagtattccacattgttctcactgctgttggtacttactctatgtgatttagtgtctgggcagacttccacctggacatcaaaaactgcattatgctaacaaaattacatgcctagtctctgctgcttacttagccaactttctggagccaaagggcttttgttttctcccagaggaagtcattctgtgcattttattttcaggtgatcttaaagggcagcaaggagcgcagcactggggccactggcgtcaatgcagattcctcccgatcccacgctattatccaaattcagatcaaagattcagtcaagaggacatttggcaggtgagctggaactatgtgcagaattgcattgtctgtctttccatatgtgactttgaaataaaaatgctctacatgagacaccctgccaccttggattttcattgcagggatatagagtaagcagtgttagccctgaaataaatcattgtataaagtgccatcagttgattaaccatgaagtaatgacctattgttggtcaacccgaagttattaaaagggacattgattacttctaaagtgaaacacagtatcagcagagaaacagcaagttctgcatctcagagagcttgcaggccataaatgggggtggggatccattcttcttgaaagaagatgtaagacaattgggtacattcattgcttttctggtgctgtcttagcaaactctgccatgctgatggatgagcctatctcacctctgagtaatgagtcgcactcttctttttcatcctttcttgttagaaaatagccaatagaactttctatttaattatctaaatagtcacctaactgatttgcattatggtcacttagccttgtggggaaatgctttattaatttcagtcatacttcctcacaaacgagtagagccaatagacatgtctaagcgagcagtgctggctccagctgacacatcaggatcttgtgatgtttttggaagactaacaataatgtcctttacttcccgaggatgagccatactccatttcttcctgaggtcacaaaatgtcactattatgaaaataaaccaaagccccaaataagtcgtccctgctgtgtctttttttctaggatctctttcattgatctggctggcagtgagagagcagcagatgccagggactcagacagacagacaaagatggaaggcgcagaaataaaccagagtcttctggctgtgagttgtttggaatctaaaagtcgtcnnnnnnnnnngccagttgttgagtctgggtaaaatcaggtggttattgcgcttgctgtcccctgacagtggaagtcctgagctggactgcaggtgcaggcagcctctgcacaaagctgttcctctcttcttacccccttgctcttttcctcaatccctaccagttagtcagagccatgttctgcaattgctaaatggctaagaaagctttttcttgctccctaaaatttaaactatactttgggaatacaaacatagaaaagtagcatatctttcagacacttgtcactcagtttcaacagttatcaacagttgaaaaacttaaccagggccagggatgtggctccgcaggtaaaggttcatgctgcctagcctaacatctgggtgccgatctctgggacccacatggtggaaagatagcaactcctacaatgtcctctgacctccacattgtgcaccatgacacacatgccaccacatacatgcacacacaaaataaatataaaaacttaagaagctagaggcagccaaatctctattatgagttcgaggccagcctgatgtacaaaacaagttccaggatagccagggctacacagagaatccctgtctcaaaacaaaacaaaacaaaaaaagaacctaacccttcccttagttggattactttattttattactgctatgtatgtatatgggcacatacatggcaggtgtctacaggtcagaggacaacttttgggagtcggttttctctttccaccctgggttctagggataaaattcaggtgggcatgcttgtgtggcaagagcttttgtccagtgagccatctcaccaactcctggttggatcaaaggaaaccctactttcaaaccattttataaatactccatatatctaaaagaaaggggctctttaattctttaatgtatccacaataaactttctcatactcttgataagtatttaaaaatctctggttaccccataactgtctttcacagttggcttaggaagatgaagacactttcctcgtcgctttcccaggcctgccttgtttttctgtatcagcataatttttttttagggtggaggtggggtggagtgggtaaacacttgcctgtatgttttcccacattctagacatggataactatattccatgttgatgtttaatgtactagtctgttctctacatttcctaaagttggttaagatttgtatatttactgttcagttttgctaggttgtttgttttttaatttatttttcctgtatgggtgttttgctacatatatgtctgtgtaacatgtgtgcctggtgtaggcagaggccagaagaaggcatcagatcccctagattgaagttacagacagttgtgagctaccatatgggtactggaaattgaacctaggtcattgtttcattgttatcaaaagacgcatacacagtatcatcccttctggaaattttccaatgctaaaaatggtagatactagattgacatttaataaagaaggatattgctgagtatggttatgtacacctataataacattccattgctcttaacagctgagccatctctccagcccccattgtagctagtcttatttaaggtgtcttcaaagtaaagtacacataggattttgaaatttgttatcaaaacaacatataaaatatctctgtaatatagtcccatatttactatatccaaaagtaatactttgaataccataggttaaataaaatataattatcatttgttctaccagtcatggtgtacctttagtgtttctgtatgctagtcagtttggttttctcaactctgcgtggcaagtttggcaagtactctcaccctcaccttatagattagggtgcaggtgcaggtgggctgaatgaaccagtcaagtgccatggcctttgaccaaaattgtgtgattctaatatcttaactatagtccagccaggaacagagaatatttccttgctgcagtccctctttaaaatgagatggtaggggatattgagatggcacacacttgccataaaagcctgacaacatgtgcttaattcttggaacccatgtaaaggtgaaagaaaaggactgaggccacgaagttgttctctgaccttcacatgtgcaccatcttgtgtacaagcatgtatgtgtatgcacaacactacagtaatagtatcaaaagaaaaataaaggagatggtagtgtgaagtaatttctcagaacttaggtttttactgctgtgatagaaacaccattaccaaaagcaacttgggaaggtggatttatttagcctacaggtgacagtccatcatcaggggaaattaagacaggagctcctcaggcaggaacctggcggcaagaactgtagtagagaccatggaggtacactgggtactggcttgcctccccatggctttctcaaactacttttttacacaacccaggaccaccagccaggggtggcactacccacagtgctctgggccctctcatatcactcattaatcaagaaaatgccctactgatttgttgataagccagtctactggaggcattttctcagttgatgttcctcttcccagatagctctagcagctgaaatctagcttgtgtcaagttgacaaaaaacaggacagaaccattctgtgtctattgctccaatttctccttccccaatcagttcatacttaaatctgcacttgaatttattcctgtaggtatacatgtatgagggggagaagaaagtagattaggcttgttctctacttgagcttgctagtagttgtgaagagggaaagaacgggtaagccaggcttaccactgcatgagcttagactcaggactcaagtctgggttcctgggtccatcagtctcactatggactcggggctaatctaggatcacagcctctaagtttaggatccttagcaagacagcacagaatggtgtttttccaatcttgcttggttttacttgttgaacaggaaacaacagggcatttgaccttctcttaggaaaaattcccaagtgtagtttgcctgtttgcttttataggaccttgagatttgttttaatgttttacttatgtgtatgtgtgatgtgtgctacatatgtttgggtgtctgaagaggccgggagagggtgttagatgccctagagccttgattgagttaacaggtggttgtgagctgcccagtgtgggtattagaaccaaaccctgtcctctggaagagcagccagcactccagtttttcaggacagggtttctctgtgtaagagccctagctgttctggaactggtacacctggcctcgaactcacagagatctgcctgcctctgcctgcagagttctgggattaaaggtgtgcgctaccactgcctataactcagtcagcactcttaactcctgtgctttatttaagaaaactaagcttcctgcctggagatatgtctcagaagttaagagcactggctactcttccagaggattagtgttcaattcccagcactcacatggaggctcataaccatttataactcctgtcccagaggatctggtgccttcttcttgcctgtgtgggcactagacacacactgacatacatgtaggcaaaacacttgtatatatgtaaagcaaaaacaaactttaaaagagaaagaagcttctaatagatgtagcggctgactttcctcactttttttgtcatgttaatgtgtcgttcattctcccactttacagctgaaagaatgtattcgagccctggaccaggaacaaacccatacacctttcaggcagagtaaattgactcaggtaaagttaaacaaaagccttgagattgttctggttcattcgttgttccttcctccattactttgttaatttagtcaagcatccactactagtaagacatgatgctaaacatagctaaacatattgggagaaggaatttaggtgtcattttccttccaggagctctcagtgtactcaacagggatatctgcagtgccggggcagctacagtcctaagagggcatccatgctcttcttgttaccacctgttgtagtgtcattctgttctgtgatcaaatactctgtccagttcatacttcatcactgaggagagtcactgcaggaacatgaagcagaaaccatggagcactgtcacttactggctcactctcgctcccaggcccatgcttcctcatacagcccaggactacctgccccgatggtgcagctcatgtacttgccccgatggtgtagctcatgtacctggctggggcctcttacctcatttaacaagatagtcacccactattacccagatagtcaggcagatctgatctgagaaatcccttaattaagactcccctctaccaggcagtggtggcacaggcttttaatcccagcactcgggagacagaggcaggtagatctctgtgagttcaagaacagcctggtctacagagtgagttccaggaaagccaaggttacacagagaaactccaaaaaaacaaacaaacaaaaccaaaaagactcccttctcagatgactgtgtcagtttgacaaaactaaccagtataccacctttccatgttctcccagtgtaaagaacctatcttactgcaggggtggtggcatcttcctgaagtccagctactcaggatgctgaggcaggaggatcacttgaacccaggagttcaagaccagcctggatacatagaagactgtgtctcaaagcataaaatactgggtgtggtggtgtgtatctatgttcccagcaacaggctgaggcagaaaacttgcttgagcccgtacactggagatctctaggcaatataatgagatcctaactgtctacccctgaccagcaacacagtggggactaggccggggtgtagctcagtgtgtgcttgcctgatatgcaccagatcctaggtttaatcctcaataagggtgaaaatacatatatacatacatacatgcatacacactatatatgtacacacatgcatatactacatacatacatacatacatacatacatacatacatacatacgatttagtagttactgagtcttgaacttgggatcctcctgcctcagtcttctgagcatctgggaatacaggccatgtttattctaagtaatacaaatataggaacctttctctttatattgtggtgaaaattactggaaagcaccagtagatacaagtcaggtatatatgagctgcagaggagcagccaaaggagagatttgcctaggaagaaacagatgtaaaagttgttatattgtcttgagctccttccaatattagatcctgtacacagggaaaaatagatctggtcttgggaggccaggaggaagtccttggatgagagcctacagtagctccaccttagtcataattagttctctctgcactgaatgtaacttctctcatttcaactatgtgtgtatgtgagaatgtagtggaatgagttcagatgcctgcagaatctagaagaaggtgcctgatcccctggaactgtagtttcggatggttatgaaccacctaatataggtcctgggaactgaacctggatcccttggaagagtctgaagcactctgaaccattgagccatctttccaaccaagtaaagtttctgctcatacatttaaccactcttgactctgaccttcaactttctgtttttaagttttcatccccagaaaatatgcttctacttttaaaaaggaataatctcaacaacacatataatatagaggcaagcatggtgtcacatacctttaatcccagcactcaggaggcagaggcagacagatttctgtgaatttgagaccagccacatagcgagtttcaggcaagccagggctacacagtgagaccttatttatctccacttaggggaaaaactagtagaggataaaaggtaccctaaagtctaatcgagttgacaactaaagttaactattgtagtagtgaagtagggaagttcccacttgtggatcttaacctggtcaaattttcatcagactttcttaaacttatgtacaaaaatgttggactttctcttaaaactatttttcctttatatttatttgtgtgcagggttgtagatgagcatgagttagttgtacatatcttctcccctgtacactcagaggccagaagacctcaggtgtcctgctccgtcactttctttccaccttttcctgtgaggtagaatctctctttgaacctggaactaggctggtagtgggcaagctccatcaacctccatccctactcctcaacaacactggattataggtgcttacagctatgcctggctttttacatgagggaattttttttttaagactttattatgtatacaacattctgtttccttgtatatctgcacaccagaagagggcaccagatctcataacggatggttgtgagccaccatgtggttgctgggaattgaactcaggtcctctgaaagagcagtcagtgctcttaacctctaagccatctctccacatgagggaatttgaactcttgtcctcatacttgctctgacccactgaaccatctcctcagcaccattaatattagtttttctagttgcttatttgtttctctgactgctggtataaataccttttgctttgtttattggttagttgtatttcttattccttgttttagatttatttttattcatgtgtatgtcttgcctccatgtatggctatgtaccacatgtgtgtctacaaagaccagaagagggcctcaaaatccctggaactgaagttatagatgattgtgagccaccacgtggttgctgggaatcaaacccagatcctctgcaagagcaacaagcactcttaaccactgagccatctctccagtctagtaatgtatttcttctttagtgaatagagcaagctgtggccagcatcttcacacacaagtaatcaatattccctttgtttattggcatgtctcttgatttgacaggtcctgaaggactctttcattggcaatgccaaaacttgcatgatcgccaacatctcaccaagccacatagccacagagcacacactgaatactttgcgctatgctgaccggtaagttggctataggatgtcaggttgtgtcagacgtgatggcacatgcctttaatcctagcacttgggaggcagaggcaggtagatagatctctgtgagttcaaggctagcctggtgtaccaagtgagtttcaggacagccaggggtacacagtgaaactgtctcaaaaaccaaaaaagaaaaaaaaaaaaaaaagtcagattgtgtgtgtgggttacatgtgtttgtgcacttgcctctcagatatgtagtgatctggcattcaactccacagccctcttcttggagatactgtccagcattttgaaaatatgaccagtgagccctacatttgtgtgtgtgtggcaagggaaagatggcacatgtccctgttcaagaatcaattggcattgattgatcaatccgggcagtggtggcatatgtctttaatcccagcactcgggaggcagaggcaggtggatctctgtgatttcgagaccagcctggtctacaaagccacacagagaaaccctgtcttgcaaaaaaaaaaaaaagatactgatgggggctggagatatggctcaggggttaagaacactgactgttcttccagagattctgagttcaattcccagcaaccacatggtagctcacaatcatctgtaatgtgatctggtgccctcttctggcatgcactgtatacatgataaataaatgaataaatgagtaaatctttaaaaaaaaaaaaagatactgatgtgatcagtatcttctcaatgtctactaggaaatggaatactaacctagtgtggtaggctcagtaagcttttcttctggctgaccacagcgctgtttgtaggagcatgtaggtccagaaaggaccaatctggacatgtcaataaagataaaggcccaaagcaggggacgacttcccaagaacttgttaaaagttagtggcagaagtagcacctctgtaagaaaaattgcaggaggtgtggggatgtgtggaagtcagaggtagacttctgatagtcagtgccctcagatgtcaggcttgggcagcaagtgcctttaccactggaccatcttgctggtcttaagactagcacccatattaactgtttggccaggtttctctctgaagggactttggtatctgccaacatccctcccctctctacttacaattagtctcttacagaagtaagtacatattataaaaatgttttacattatgtatataagtgttttgtttgtctgtatatatgtatgtgcacccatatatgcctggtgccagaagtcaagaaggcatcagatcacctgaaactgtagttagagagggttgtgagccaccatgtgggttctggggaccaaacctaatagatcctttacaaaaacagcaaagctacacagagaatccctgtctcgaaaaaccaaaaaagaaaaaaaaaaaaaaaaaaaacaatgtggtgctaagttagggggatgctgggaacacatcatctttcccttagtaggactaacacagtctgctcctttttggaggttttgctttcttgactgcccagcagatttagggaaattcatcttcccagagaagcctggcagggtttttgcaggacaacaggagtctgtgagactataggtgaagagtaggcatgaattcctgagttggcctatattcaggacccatggcaggcactgcatgaatatagcaagattctgattgctagcctgtcccccacatggggctgtggtgatttgcaaacttccagtcacatccacatcatgttttttttttttttttttttttttttttcgagagagggtttctcttgtgctttgaatggaggctgacctggaactagctcttgtagatttggctggtcttgaactcacagagatccacctgcttctgcctcccaagtgctgggattaaaggtgtgcaccaccaacaccaggccaggccttttcttttgggccaccaaccacctcccaaatcatgacacggagactaattattagttatgaatgctcagccttagcttaggcccatttcttgctgcctcttataacttaactgtttctcttcttctatgttttacctcagggctttttatcttccttccttccttccttccttgtttccttccttgtttccttgtttccttccttccttccttccttccttcctttccttccttccttccttccttccttccttcctttctttctgcatatcttattttcccgctgtctccatggctgggtggctggctggctgccaggcttctggccctgggcatgtacctttctttgtccctcattctcttcttctcttgtgaacctagatatctcctcctacttattctctctgcctgccagcccagcttatccctctcctgcctattggccattcagctttttattaaaccaatgaggtatcttaaacaggtaaggtgaaacaattgaagcacatctttacataactaaacaaatggagcataagcaaatgtcacacaccttcacatacttaaatatcccacagcataaacaaatgtaactaatctttgcctagttaaaataatattctgtaacacccctccccagagtaagaaagaacttatagtccttgccatacttcccttgtttgttgttttaattccctgaaaactgtaggaaaggaatcacagatacagaagaatatatagttaatgttaaatggttatttccagggtgaaggaactaaagaaaggtgttaagtgttgtgcttcagccaccagtcgaaatctgacatctgcaaattcttctccaaaacgaattcaaaactcccctgttgccctgtcaggggacaaatgctccccaaaaaaagttaaactaggacttcagcagtcacttactgtggccccaggccccacaagagttaaagaccacccttttgccagccatgctgccaatatcccctttgcctctggacctaaaacccccaataaaaggggtagctctcgagggagtcctgccccagagtgggatacaaaggctagccctttgaaaggaaccatgaggtctggccatttgatcaaaaagggagcagaagaatcagcaccattgtgctctgagaaaagtcaaattgtcagcaagactgccattggatgggagagcagggcctcaggctcaagggaaggcctacttcgtatcaggatgcctgccagagggaagaaggtgcagccagtacagccagtgcagaagcagctactgtcacgatctcagctccctggcaacagccaccatttagaagccagtcaggacagcaaggtgggcacacctgacatgcttgcccctgaagcttggacaaactctctcccccagcagaaggaaagggaggaacatttgcggttttatcaccagcagttccagcagccaccactcctcaagcagaagctaaaataccaaccactggaaaggcttttatgtcagcacaggccctcagaaggtcagctcccaaatgagaccatttctgccctccactctaatcctgagagctatgatggagcccaggttgaggaccaggacgacagtgatttcagtgaggattctttctcaaacatgcagaagaccaccttggagaagagcggaagctcattcttcctacatcagaagagggaacacagccctgaggagcaggcagcagaaaggcagcagtgtctgcatttcagctctgagacagacagtaatgacaggatgccagctgacatctgggtatgttccaaggaccccatcataaaccatgcgagaggagtactcggtcagagccacagcccaagtaagctgtgctccgtctggagcaaggaagaagactctgcctcctcagggccttctcataaggacaacctggcccagaagccttcctcctcacaggtaggttttgtgcatcaccaagaaatgggtgaagctcaagcctttgacatcaggctggaggccttcagaagtgaggttcctgggcaggctgagggcagcttgccatccccagaaaatgggctgtctttcccactatcccacattgcagttcctggatccccagacctaagagacagagaagtcagtgacgatagagtgacacaggcactgggaacagtgaacagcagtgttcctttccaagaagactctaaagagcagttacatgcgtgctctgcaaatgcgtctggactcatggatcctctcactatgtccctcctggagacccccaatcaggacccttcttccttggagcagactgctcaggatagagctgggcatggtctcatggctgagatcacaggagggcctgcagtgggacacacagtattatcttacaatcaagaggctgccttgccaggatcttcagcagctgctcacctatggctgtcctcatctccccctgacaatcggcctagtggtgatcttccatctctgtccccgtcacccatccatcagcattcacctgataatctgtccaataggggggcctgccagagcagaaggcctgcactcttgtcccagaatcatgtgggtgatgacccatctgatgacagtgagactaaagagactaaactggggcactccttgccattcccaagaaagcccctctccaggatacacgctggagtaccttattctacacctttgctcacctcatggaaaggaagtagtgatgaggctggcagtccctgggcccaggacagagaacatcctgcagggcttagctggcaggagcttgtttcctccacagactccatcaagccctcggacaagaacatcttgtggctccagcacaagccaatctcaagatgcttagcatcagacactcctgtggtccccagctgttccctcaaggcctcagggacacactgtccactcacactggagcaggcgcagtaagttggactttgttcttaagacttaagcccctctagcaccccatgcccttttccagtttgcttgcctcttcagtggacaaacttgctgttcctgttgtttagaacccaatgaaaggtagacagttcagcttttagccctgatctgctttggtcctgatagaaataagagcagaccttgtaccaaataccccagctgccacagctttatagaatttctcaaggaagccatgggaaacaggcagccgcctgagcagcagctaggaaagcaggacagccagagaagtctgtctctcctgatcttgtgggtactccctagcccttgactagtcctatgaacagaacagagaagaaagcaaagagcagccagccagccttaccaccttgggcagaggtagggcctggtatgaaaatgatgctcagtttccaaaggctgtccatgagtgggaaaccaaaagggtcagtttcttccctatgttcctaggcaggcagtcatccgtgcacaccaggaacagctagatgaaatggccgaactggacttcagggaggataccttaatgacccagatggattccaatgtaagtagaatagccacatgggctattgacagctagtttgtggtttggtggtcatgtttgctgtagtatttatgacatcaagttctgctgttgtgcactaacagttggggccttgtgaccctcagagggtctgggagaggtgggagatggtgttatactgctcactactgtgtccagcctctgtccttagccattctgcctttctgaaggtttgttggagcctccctgtgattattttaacagtggccatcttgctgcttacaacctgtagaccccaagcattatttataagtacccctttgcagaatatagcctccacttatgatggggttcccaacaaaagccatagaaacttggaaggttttcccctaagaagatggtctagagagaaggctcagcagctaaaaacactcattgcttttgtagagaacccgggtttggttcctattacccacggggtgactggtagagagacaaaacattcaaacaaaaaaaaaaaccttatacaaaaaagtctagaaaagggccgggcattggtggcccacgcctttaatcccagcactcgggaggcagaggtagggggatctctgtgaattcaaggccagcctggtctacagagcgagttccaggacagcctccaaagccagagaaaccctgtcttgaaaaaccaaaaaataagtctagaaaagatggtcattaagagaaacacttccacttgtctgtttgttgtcaggattttgaggatttcgtgacccagctggacaaagtcctggctctgaagtccagttgcatacagagtgtgagaagacagctacagctgtacctcacctgcaggccggctgcagcccccaagagaaccaaccatgctgtcttagaggaagacttaccctgggtggacggccaggcccttcctgcggacaaccactcccagccctgcctctagtcacacatggccttggatggccacactactcaggaacagaactcaccttacctcatttctaaccatagaaaccacttataagaaaggaccagactgaagaccttcctgtccccttctatttggggttcagagtatttgctttgttgacctgtgtctgtaggaacatatttggtctaataacagtagatgttcctaagtttcaggatgaaataggggtgttcagtggtaacctgggggtcagaggttagggaccacacactcagccaatagccaaattgcctttctgtcttcaaagactacagcattggtgccagccaggcagttgggtgagtgccttcccaccagagagtagagatttagttttggaaaatataaactgaaccactcttgatgccttaagagcaactgggttgggggttaggctttatgcttgcagttcccttccctgaaacccggctttgagaggggggggggggggctgttggcagcacatttttctcatttactttttgataagacagcagacctatggacggtacctactaggcctcagtttttgtggcaaaacctggctcctgtctatgactcctcactccctgtccctctgaataattaaataggatggaggatctcagacaagtccattgcctagactgaatttccaggacacctgggccagccacactcaaaagccagcctttgttttgggtgtcttggcactgagtgtggagtcaatagtctgaaccttctgatataggaaaaacacactgtactcttcaaatgaattcttgctctattactgtgtgtagggcaggtgttaccaggcacccacaatcattctctgctgtttcactgctgatttggctagccaataagtcccatgggtcagactgtcttagcactctgtgtagaccagctcagagatccacctgcttctacccccaaatgctgggattaaagatgtgtaccacaacatccagctggtccaggctttctgcataggtcctagtgatgaaacctcagcactcatgcttgcaccaccagcactttactgattgaatcatcttcccatctcttgaaacagggtttctctggctttgaaggctgtcctggaactagctcttgtagaccaggctggccttaaactcacagagatccacctgcctctgcctcctgagtgctgggattaaaggcgtgtgccaccaccacctggttctgtatcaccttttaataacaagaaagcacctcaagagcctccaagggtccattagttttaaagggctccctgagttaacctaagattcatgtgtcgcagcatggacccagaagccattaccatatgaatttaagttatgcctgaaactccaagataaatgaggtatggcatcgctcacttgtaatcccagcatttgggaagctgaggcagaatgaggaccttgaaaccaacatgggctatatttaaaaggcttacagtgggccacagacagtgcttgaaatagccaccagagggcagcctgttcctagcttagggttgtacagcacctccttacatggccactaaaaaccagagattcccagccaagaaccccatgggattctactaaagtaagaactagaagttttaggtattaattttgtcagctgcaccaatgctactgaaagccttgcctgtgactatattcatgatggcataccggtccccaggagctgaggaccaaacccaaggcctagcaagtgctttaccactgagccaaccccagattttttcttttttctgtttttggtttttcaagacagggtttctctatcggctctggctgtcctggaactcactctgtagaccaggctggcctcgaaatcagagatccacctgcctcaggaattaaagacatgcaccatcaccacctgaccaacttttcatttttaaagaacatcttgaagtctagtctgcccctctctactctggcaagaaggcatatgccttggtccagatactggactagatcaggtttaaaggtttagatctttgggtctgtatttgtaaaccaaaaaaaaaaaaaaaaaaaaaaaaaaaaaaaaannnnnnnnnngcttccaggtcccacaggcctccagtggaaagagtgcattgaaatgcagactggaaatgattattgcacctaccgccatcctgagtcaagctgttttccaaaataaagaagttaaacacaatgtaccttttaggtttttattagtagttctctgaagaatcaaaatagttagcaaattattttagattcaagactgtattatatcctttgtatttagatctttaatggtgtagaacataatacaaacaaaccaaagagtggtttctatgcctaggtgttactcattgtgtcatcctaaagcagggctggcagagactgttcaagaactggggattagtgctgagtgactagtcatggcctgttttctcatcgattcagtgtgctgagaaggagccaaagattactcaaattgacaacagcctcagcgcagggactccaatgccctgcacagtagaggattatggtctaagccaaaagaaacagtcaacagggacacatgggaactgcctagcagaagactttgccccatgaggaaaagtgcatcttttgtaccgtagagacatccaaaaccagtgtaacactaaggaatgctgtgggaaggtgggcctggaagaacttctcacttgtatttgactcaggttagagttcagtctgcctatggtatggcaaagagaaaagcatctagcccccaaacagcagcagtcttcccctcctcctcttcccagtcctcttgggagccaggtcaggttttggctgaggaaataagagaccccagaaagatccaagtattctttctgaaaggccaatgcgggaaggacacttctcaaaataacagctatgtttaatattgaaggagccagtatggcatttgtatgctcaaatcttcctaccttccccccagcttgggccggggctcacagagactagcaaataatcatctccacgcctgaccttctaacccccaaagaaaatctggaagcatgtcccttcttccccacaagtgagctgtgcagggcctcctgggggatggtgttgctgtggcagggcagtgacaggacctagtctcagctggctccagcccgggccatgaggtcttccaaagcattgtcctggtcattgttgtgtaatagcaaaacttccttaatgtctttcagttcaaagcccatttccttaaatttgctcatcaactgaagaaactccatcatctatgggataaaggagaacacattttaaaaaaggctcagctgaatatagaggtatattgcaggtggaggatctgtatccttccaccagagtcttgtagatctttctaaagttccctagcaagcagaggggggctgtgaagcccagcctctactcacttgctgacctctgtaagagtcccactgaccacatgaatatttccatcaagacaaggtattgaacccctggggttgctctctaggtagaagggaaggcaaaaattctagcagtggtccaagctatccaaaagcctggcttttagcccaattcaatttccccttcctatcactctgattcatctccacgcttcatctttactaagaaaggactcatcttgtctggccacagaggactctgtctttgactgcttctgcctgcagtcactggtaaggaaaggaaacagggcccagagagaacaccaggacagacaactgttccatgaatacggaaggtcctaccttttcttctgaacactggtgcatttccagagcctcttccactaaaagagggtcaaagcccttctcacaaagctgtccatgtgcaaagagatagtcgagaatctaaggaaagaaacaaggtttaatctcctactgccatgcctctgtgctgagttttagaccatctgtgtgaagctccctgaccctccccagtcatcagatcctggacagtcattacttggtaaatagactggcatacttttctagaaatgagcagccacttcccaaaggaggtgctgtcacagctgactcaactctcccagaatgtcaactcaacactcagggcaagatgatagtcctctcaaaacatatagcacatgtcaggaaatgtccccaaggtagaaacattattcagagcttcctgtgcagccatgacaaaagtttctggaggtaagccagtagcagtaggccacacctatatgctagcactcagaaggtggagacagaccatgagttcaatgccagcctcagctacctcagtaccaagcagtgtgggctacataagaccttatctcaaaagaagaaaaggtctagattgagacattaagcatatgctcagttctgtcctctctggagatacaaaggggtgggtgatgacagcggctccagtacacacccccaggctttctcccagcataaagaagtactactgctgaacttctggcttcctgataataccccaggccaggttcaaaacacatagtggaggaggctggagttgcaggcagatcacaaccctgacttgaggccaccatgcttctccacccacaccttgcagatcagcacctcacctgctcaatattctctcctttcttcttcatggctctcaggacacaatcgtatgagtagcccatgttgactactgtctccacacattgccgctcactcggagacagtgcctgcagttccaaataggcctggggacagctgggcacttgtgacactgagaaatttagaggggtgacctggcaatagaaaaacaagatcaaaaacagatgagctgagaggcccaggatgctgaccaagcatcatgggatggaaagaagagtggtaccaagtaccagcctacagcccttggaacgttcaccatagcccttgcatgtgagaatgcacacacaaaacatgctgctccatgccctgatccccatgacttaaaaagcagtccagagtttgaacctacctacaggattattgttggagcaggctgtgcagacttctctctagcattccatcagccctgcatctcaaagtccttaagggtcattcacttcaaaccttcccactctggaactgactctatcctggtctcactcctacgtatcactggtctaggcttcccatgcagttagtgcagggcgtcaggattttgagagcacacaacatactctgcttcatccttgctaacactgctgtcctctggagcaaagaccctaggctggactcctagtcacagtgtacttacactagctacaagcagcttgctgcctgccactggaacctccctagttctcatctgactggttacatctctgatgtaagggcagcgctgcgcactcccagaccaaaggacctattcaccatgggaacaagatcacaagctgttcatggtggctcagctcccaaagaaaacactgtgtttccccttgttttctttttctattgggtagagtaaagcaatgagtagtcctctggcctaaagcaaattctgctataaccagatgttctccaactctgctgaggaaagccagaagagcacaggcctgtagactagtagctcccatcgaaatatcacctctaacataacagtccatttccaggggcttcagcaagttacaggaggcatggatgagtgggagctcctcataaaccagtctagccactttgtatactcaagattatatgaaccttctcaggaccaggctctgcggactccagagtaccggcttctgaaacagtcaaggtagctctttgacacaagccaagaagccaggattattctaaaacatgtgcctctccccttaaaaagccccgagagtcaggtggtagccgtgcacacctttaatcccagcacttggaaggcagagacaggcaggtcactgagttctatgtcaacctggtctacagagtgagttccagtacaaccaaagctacacagagaaaccttgtctcaaaaccaaaacaaaacaaaggctgataaaattctttgatctagctatatacctctagaaatctagtctttgggaatattaaaatgcaaacctaggggctggagaaatgaatccagtcctctggaagagcagccaatgctcttaaccactgaagcatctctccagtcccagtttttattttaaaaatagggtctcactatgtaggcctagaattctctatgtagatcaatttggcctcaaactcacaagatctgactgcctctgcttccatggtgctccaattaaaggcatataccaccataccatgcccaacccaaaagatttttagatttttattttagatttttagatttttattttagatatttattgtgcttgcctgcatttatgtatgtacaccatgtgcttgcctggtgactgcatagcccagatgatgtcatgagatttggaagtggagttacacaaggtgatttagccatcatgtatatcctggaaaccaaacctgggtcctcttttaagagcagcaagaactcttaaccatctctccagctcaatgcatggggttttaaatagtaggacagagaaaagtatcctttctttttttaaaatactaggtctgagactacttctgaacagagacaaatgaatgtctcctttacataatgttttagaatcaaataggcactatagtaactatggcgaccctaaatggacaatgtttaaaaggatcccttattactggggcttagcaagactatctccaaaaaataagaaaggatcccttgtcaaaattaccaatactagagtgtttcaaaccattcatcaaggttaataatccataattatgattaaatgggtacaatttgctgtgtgcagtgtgatactactatgctacatcccagactcagatacaacaccattattgcatttaagcagtcctttcttattaggaattcttccaataaaaagataaaatgtacatattggcaagcataaaattcagttttaatcttttatattcagtgactaaaaactgggctaaccctcagcttggagagaccaggaagggcccaacacagtaactaataagacatatcactaataaatgtcaaactctccagagactgaaggaggttcacaaaggcttctataggtgggagtggacgtgaacaaacccagcctgagaataactgaaatgctagatctgtagggttttgatgaagctggcgatgcagcacctatgctcctgcaaaggattcaggtttgcatcccagagcccacatggctgctcacactgtctgtaactctggttcccagggatccaacacactaacttcctcaggaaccaggtgnnnnnnnnnnagtgacaacacacacccacctccacctcctctacctcccgagtgctgggattaaaggcgtgtgccaccaacaccaggctcaattcttttttttttttaaagaaacaagaaaaataaataaataaataaataaataaataaataaataaataaataaataaatgaaacaagggcctggagatgagtcaggttagggcacttgtctccaagcctgaccacctgaatttgacccctagaaacgatactgtagaaggacagatccagctcccacaagctttacagccacacacacaaaaaaatgtgataaaaatttacaacaaatgtttaaaaattcaagaaattatatacaaggttgtggctgtaactaaatttcagggtactcagcgtgcagagagccctgcctgggctggaccccagcagatctgtgatcccagcactcaggaggagtgaaagttcaaggccaaactcaaacaaaaagccagtctgggacacatgaaactttgccaaaacaaaagcaaaaatacaaaaatttcaacaacagctttttcttaggagaaacaaggaaacagagttagaaaaagaaagctcccatcttggtggtgtacatctgcaatcccagcattcagaatgctgaggctgcagagatgccatgattggtacaaggcttctaacacaggatgggattctgacttagatccctagcacacctgtaatccaatgctaaggaggctggccagtggcctgtcctgtcctcatcggcaaccttcaaggacagtagaaagtgaatgaagacagccaacatccacatctgtcctccacgcaaacacaggtgtgcacgtatacacacacacacacacacacacacacacactctctctctctctctctctctctctctctctcccttctctctccctcttctctctctctcgctctctctctctctctctctctctctctcaaacactgggcacaacttgggaggcagaagcacagaagcaggtggatttgagtttgaggtcaacctgatctacagagctgtctagttcaaggacagccagggtcacatacagaaatcctgtctccaaaaaaaaaaaaaaaaaaaccctgtgtgtgggggggggggaaaaagctctggagcctggtacctcctcctacctctccttctgggactctgattaggctctcaggcttatatgcctttaacctgatgagccattttgccaggcttggtggaacatgtgtatagtcccactacacagaaggcacaaacaagaggatcacttgaatccatgagtttttgttaactcctccactcatccttgtttgtttttttttaaataatttatttaactttgttttatgtgtattggtgtgaaggtgccagatcccctgaaactgaagtaacagacagttgtgagctgccatgtgggtgctgggaattgaacccgggtccgctgaaagaacagccagtgctcttaaccactgagccatctctccagccccccactcacccttttgtttgttttattctttctttctttttttatcctgaggcagggacttatgtgtagtactggcaggtttgaaactctgtagatcaggctggattcacttgcctctgcctcccaagtactgggattaaaggtgtgcacctccactgccagcaccagaaggaatttaagagagatttatataatcacagcactcaggaggtataaggagaactgtcctcaagttccaggcaaccagaactgagtctcaaaaaacgggggtgggggaatgtaaagacaactggtgctattctttttatatttgctgcaactaataaatttaaaagtcaaagaagtttaagtggaaagtgacttcctaaagaaacttgcagttttctttaggaaactcaaggagcttgaatgtgagtgtgcaaactggataaatgacctgggcataacgagcctcactcagaagcagaacaacgctcctgagggactgaggcagtactacactagcctaagactaagagcccactgcatgactgttcttaagaggaatgcaagttccttaacctctagtgttatcttactttaacagtaaaccatgaaatcaaaacctgagtgacgagactgaacagccacctagcctggtggtggcacacacctctgatcccagcactcaggaggcagaggcaggtggatctctgtgagttccccagcctggtttacagagtgaattccaggacagccaagggcacacagagaaacccagtctagaaaaacaaaaatacaaacaatttagatagtcttcaacttgaaaaagaaaagttgtaatctttatcaatccatcctaatacatcctttgacccttcctttcaagactgcctaatatacaatgttgacaggataaaaaagaatcacataattacaatctatagattttaaacaacagatatctacctattactattagccatttggtctgaagaaatgttaaatcctaaagagccacattctgattaaaaaaacaaaaacagaaaaaaaaaaaaaaaaaaaaaaagggacaatgagaatgtggaagctaggagaggagcgggtgtgaaaaggaaggagcatctgcaagaaagacgggaatagacaaccaccaaacggccagacacagggacacacacctgtgatgccagcactcccgaggtgcaggagatcaggccatacagtaaaaccctgtctcaactaaaactaccaacaaaacaaagacaaaaaagctaagatggaacagcacaaaaaagacccaagattagacagagaaatgccattcccaagggtatctcttctatatgcaaaggtaaaggtcttaaagatgcagggaggtgaacattaaccaaggtttggctgtggatgtagtgcagtggcagagtgtgtgtgtaccatggcaatgtcctgggtttgatccctagcacggaagaagaaccaaaagtaaataaatatccaagctgggttcaaaagtaataatcccaatcctcaggaaaacaaccagaattctatcaggtgacaaggccactctacagtatcccatcaagcacaaagcctgtgggagacctttgctaaatgggatcactaagacagctttggggctataagttaggactaaagacttactgtgggacatgtatttggaggtgatgattcttctgtacacacagacaagacagacagggaaggcatctgggaggatgtcatggttggcacttctgtgccactgttcaagttcaaagctgaaagcccaagagcatggtccccattgagctcactggcactgctttgggtggaaggctttaggaaattccgggatgtgccgcttcggaggcaggatgtgctatgaaaagtgctcgcaagcttgactgtcttctgattgctgtcatcagagtcaagtttggggaaggacagagatttgatattgcttactgtagggataggggggagggacactttggaagacagcgacatcttttcacagttgcccaactgtggtagggttataaagccattaggtttatgaagaggcttgaaatctaaggttgcttgctccaaggatgccaagacctcctcgtcctgtaacacagaccccgggcttcctctgggtgagttactatccagtaactgagccattataggtccagtggttcctaccagaatgtttcttagctcctccttctcatcaatagtttttaactccagattatcaaatgggtcctcttcacactcaaagtcagcagggttgaaatctgcttttgtgtggggtgggctaagaaccttctgctttgtggcactactgctgacccgagttggagtgaggatgctgttgtgctgtaagctggcaaggatggggttaattggaggtggcattgtggctgtattgtgagtcttggagaaactcattttgctgtcaccctctgggccactcttagaattcactttagcttccgcatcctcagccttgcgctctgcttctcgctgagcttcttggatcagcttaacatcttcagcccactcaatggttttcttttccaaggagaagtcatactgcagagatacagcagagagaggaggtgtgagcccaggggctgctctcccctacccaactcaatcctgtgtaagtgaagcaggcagcacttcagcagatagctgagcctcctgagaagcatcaagacttccactgtccaaaccatgctcccagattacttcaataaattaactctacacaccagaccacagggagtgtgccacatcctttgtttctcttccctgtggcttatccctttcttaattgtacatggctgggggaaggtgttagccacccactcaaggaagctatcaaaatggctcaattgttcttctaaaattgtatgacatctctatcagtcatctactggtacatgcatgtaaggacatgtacttaatgtgcaaacattaacacttcctgctattggcagcaaccccacagagcacctttgggtctctattatatagcacaatgttctacatagatttcccacgatcaataatgacagcacctaacattgaagaatgagttagaaggtaccacatgagtgaatttactgttttgctttgttttagcagaactgggggcctgaagccagagccttgtacatgctaagtgctctaccatcagcccatgagcacctttcatgggttgactctctaaattagctaaaaccccttagtaattatcaatatccttactttacagccttaaaccccagaaatactggaacctggatctgaagccaggtagtctgtccagattctacactcttaagctacagacggtaatgaatagattcagtcaaaatgcgtgtggagccacagtgctcagctcaacagtgtacatgataaagtcgggatgagattagcatggttctgcacaagacagacatactaaaccatgaagcagtctgtactttgctggacccttttatctgctatctgttactctttccaaggaattcagtaagtcttctccctctgcttccataacagaaaaggggaaagagaagcagaagccacacacgatgacctatgtggaagacagaggcaagaggatcacaattttaggccagactggacattgataggagacaggacagagaaacctagatatgagactggagtaagtgctcagtggcagagggtatgaaggccctgggaagggagttctttctaagatttcaaagaatatcctagtatttgggaagtagaagcagaaagattaggagttcaaggttggctctgtgaaatatttaaaacaacttcatagttccttaatgaaaccttaaaatgtagcccaacttacaaaattctcattgccacagtgctctacagagggggggtaggagctggaggaaggtgctgtgttttctatctaccatgaataaaactgagaaaacagctacagacaaaggccctatagagcttctaactggaggagctcaactcttttttttttttttttttttttgattgtataatagttgcttttctcattgctgtgtgaaatacccaatgaaagtaacttaagggtgaatgtttgttggggctcaaagtgagggcacaggagcttcaggcagctggtctcattgcacccgcaatgaggctgtagagagacaaatgccagtactctactagctgtacctgttttattcagtccaggaccccagcgcatgggatggaccacccacaatttcagttaacctaacctagataatccctcataggcattcccagagacttgactcttaaatgcttctagagcctgtgacaatcatcatcaacttccatggatcccactcagtagtctggactatactaaaactgtgtagttcagtcttagcctcaccgtaagtgctaaggttaaaagtgtataccatactcaaatgaggaaaaccaacctctaataaactgactttccacaagtctctcaagttttcactctcagaatatttagaaatatcttttctaaaacagccttactaagatcctgctttgtttttgtaattattttggtgtttgtctgtatgaggcagagctgcatgtatgtagctgaggctgacctcaacctcacaaaacagtcggtgtacgccatcacacccagttcattcggtcaaacacaaggcttcacagatactaggcaaacactgagctacactgccaggcctgtttcctttggtttatttttgtaattatcaaattaatatagactacatgggaaacagaaaagttgtttttgtttgtttgtttgtttttaagtaagcatgtggtttgagagtaaaatgctgctgctgttggagctcacattgttgaaggcttgcctttgcataaacaaggcaagatttgatccccaacactacataaacccactcatggtacctataatcccatcactgggatggtggaggtaggaacatcagaagttcaatgtcaacctctgttactcaggaagtatgagaacaatgtggggtagagaccctccccactcctctctacctggcaggaagagaggagaggaggagaggggagagtggaggagacaagagaaggaagagggaggaaaggaggagagggagggggaagaagaggggagaggggaaaagaggggaaggggaggggaggagaaggaaaggggggagagaacaggggagggggaaggggagaggggagaagggaagaggaggaaagggggggcaagaaatagcacaaaaaaatccaagtagtagtggcgcacttctttaatccaagcactggggaggtagaggcatttggatctctgttgagtttgaagccagcatggtctacagagagagttccaggacagcctccaaaaccacaaagaaaccctgtctcgaaaaacaaaaagcaaacaaacaaacaaaaaagttaaagaaacagtacaatatggagtagaagaggcaagcatggggctgagactgctcagtggttaacagcactagctgcgcttccaaaggtccagggttcaattcccagcaaccacatggcagctcacaactgtaactccagttccagggatccgatatcctcacacagacatatatgcaggcaaaatagcaatacacataaaaataaaaataaaaaaagaaataaagaagcaagcactatcaattcagtagaggcttccccttggccacagtttctttcgctatagtttcgtttgtttataatcaactccaatacaagaatagtaaacaaaaatttagtaaacaaaaatagtaaacagaaaaaaacacctaacttttgggctggaagacagttcagcagttaagagcacttattgctcttgcagaggacacatgctccgttcccagcacccacatagtggattaaaactatcctttcatttcatatgctgtttttcaaggcagggttctttctctgtgcagccctggttgtcctggcactcactctatagaccaggctggctttgaacacagagatcggcctacctctgcctcccaggtactaggattaaaagcgtgtgacaccactgcccagcaactatccttaactctagttccaagggatctgacaccctcttcacaaccatgtaggtaacaggcactctgaacagtgtgataaaatcaggcctcttctctcactcagtcctgccagagatgagtgtccagcacatccacagcatgtgtgacatctggcagttagtcccactgctgtgggcctgcaatgcttgtatgtggagttggacactacttgaggctttaggcatcctccagaggctgtggaacacatctggttggctccctaggatttttgatcctagtgttgaggtggaaggagtgctgagaggtaggctaggggatggcagaatgtagtgcatttcctgtaggaagtatttctcaatctttcagaacttgcagagaaagcattaataagataaaaaatgggggtgggggagcctggagaggtggctcagtggttgagagcactggctgctcttccagaggtcctgagttcattcatttcccagcaaccacatggcagctcacaatctcaaaagccaattatcccattttacagatgcagaactggagccttggaaagttaaacatctgtacagctattgtacaatgtctgcccacatagcaatgacagtagagtctggcagtggtggtgcacgcctttaatctcagcactcaagaggcaaaggcaggtagatctctgagttcaaggccagtctcttctacataatgaattccaggccaagcaggactacatggtgagattctgtttttttgttgtttgagaaggagagcacaacaacagtcctctaagtagtttatacaggagtactagagcccagccctcctctacagtgagtgctctgagcttagtcctatgtacttatcaatgcttctcgatagccaaaaaagagatgtccagcaaaatctaaagtggcaaaaattgaagctcaaaacaagttttctgaagcatcagtgaagccataaaggaatgaaaaacaaggtacaggcgctttaaactttctcttttagatgcacttctatgatctgagtgtgacttagcacccggttcccaggagggctgcctgaggaaactgtggaacctttagttagaggggtctggttgagggaagctcatttggggagtttgagggatacagcccagtccagattccaggcccatgcatggggcccagaagtagaatatgaagatttgaatgtgaaatgtacttggcaggttcatgttcttcaacagttggcccacggctaatgtcgctaatttgggggttggctgaagagatgggggctgaggtgttttgtttgagcacagtctcttacctgacttctcaatgtgactagttacctcacactcatgtggtagcggacagaagctggtcccacagcacacctccacagccatgatattttccccaaatcacagcccaaataacccccatccccaagtagtttctgtaggaattctgtcagcagtgaggaaagtaagtaacacaagggtctctccgtgttgctatgctggtctcaaactactgtatgaaagtgaacctactgtctcagcttgccaagcctgtaggagtacagtgtatatgtctgctcccagcaaaaatcatcacatctcttgctctttttttttttttttggtttttttcgagacagggtttctccctggctttggaggttgtcctggaactagctcttgtagaccagggtggtctcgaactcagagagatccgcctgcctctgcctctgcctctgcctcccgagtgctgggattaaaggagtgtgccaccaacgccccggcctattttttgaagtgtgcgtgcatgcgtgcgtgcgtgtgtgtgcagtagtagagataaacccagggcttcatgcatgtagcacacatgctaccactgagctacatctttatctctggggagcgggtatttaaatcatattgttacaaggacagcacacagaaaagtatttaatatttattttattatcaggaaaatggagcaaggtataatgtaccttctggccaaatgaagtgtccattaaaaaattatctatccagtatttaaaactacataagatgcttagcatcattagtaaaatgcaaatcaaagtcacaaatacaacttcacacccacaaagtacataatgaaaaaggtggttacactggacaatggtggcgcacacctttattcccagaacttgggaggcagaggatctctgtgaattcaagaccagcctggcctacaaagctacacagggcagcctggtcgagagagagagagagagagagagagggagggagggagggagggagggannnnnnnnnnnnnnnctgcccctttggaatatcatttggtagttcctttaaatagttatgctaaggaccagtgattctacctttgtacatacatctagaagaatgaaaaacaagcgaaagtctgcatatattttcatagcaatactgatcataacagtcaaaagtagaaactaccaaaatgtctatcaatcaatgaatacacaaaatgtgacatatccatacaagagaaatactacttggcccatagtaacagggacatagaggctagttttattaaaatcaccaactcttcattttggtctgtaggtgtctgacgagtaactaatggcaagacagaagtagaagtgtaaactggcccttttctgaagcattctctctcacactcacttgggctccaggaacaagaagtcgaaacacctggttccaaaggctgaaactgccctcccaggcagcagcaacttttctttcttttttttttttttttaagcagaactgaacattttactaatgatacacagtaaggagaaaaagaggtacttaggagacatactctgtatgtctagcagcactttcttatcaacaacaaggccccattctgaaatatgctcaaccagaccacactgtctacctatgcaagcctccagcttataccacagaattctcatgggatagacaggcttttggctttagattaccagtaggtgcccaccctgagaatacattactttcatgtctcaaccaccattcatctcttcatttggccttttgggatgaaggaacagacctggttcactgggagcctccagattcagacctctggcctaggactctaattacaataacctaaattaaatatgcctgtcacaaagaccacagtaggtttcttttgggagtgggaggaataaaatattctagaagttaacacatctgtgttaacttcctgttaaaaaccctggctggagccaggcggtggtggcgctcacctttaatttcagcacttaggaggcagaggcaggggaatctctgtgagttccagaccagcctgagctacacagtgaggtcctgtctcgaataaataacaatgtattatttgttgttggggttttggggggcttttcgggggggggggggggaggtgagtcnnnnnnnnnnnnnnnnnnnnnnnnnnnnnnnnnnnnnnnnnnnnnnnnnnnnnnnnnnnnnnnnnnnnnnnnnnnnnnnnnnnnnnnnnnnnnnnnnnnnnnnnnnnnnnnnnnnnnnnnnnnnnnnnnnnnnnnnnnnnnnnnnnnnnnnnnnnnnnnnnnnnnnnnnnnnnnnnnnnnnnnnnnnnnnnnnnnnnnnnnnnnnnnnnnnnnnnnnnnnnnnnnnnnnnngggcgcacgcctttaatcccagcactaaggaggcagaggcaggcggatctcggtgagtttgaggccagcctggtctccaaagcgagtgccaggatagctccaaagctacacagagaccctgtcttggaaaaaaaaaaaaaaaagagagagagatgagatagctcagtggttaagagcactgactgtcttccagaagacccaggttcaattcccagcaacaacatggcagcttacaactgtctgtaactccagtgccagaggacccaacactcatggcaaaacacaaagtacatgaattaaattaaaattaattaaaaaaaaaaaggtctggtggtagtgactacatctttatctcagtacctgggagacagaggtaggtagctctctaagtttgaggccagcctggtctacagaactagttccagaacagtccagtcaggactggaaaccctgtctcaaaaacaaaaacaaaaaaaaacaaaacaaaaagagagaaaagaaaaggcaaaacaaccactgaagtgaataggacgaaagggtgtgaatttaaaagtctgtgaatcctatcttaataaagctattaaaacaaagcaactgaattttcctgcatgcagactatagaaggcaaaatacttttaaattgacatgctgatgacctagtgagtccccagaagtaaaacttcctttccaacaaggtggagtaaagtcttccatggcgacaggaagatgtgtgagctctgtgtgtacttctggttttgtcagcacctttaagctgtaagcaccttgaggacactgacatgcctctctcctggtccccggaagagcacctcccaaaagcaggcatttgaaaagtgcctactgaagtaacactcagctttttggtgctttcaagaagtaatttcatgtatttatatataactggctctaaagatgagagggttgagagagatgctctggagagcatttaggcacagttctaacagactgatatgacagctttctgtacagtcagaaacagactactccactcagagacagctcacagggaaagccaggcactgggagttgaacaaagtacattcaacaaactcctgctgactcagaacatgaagatgaccaaaagtgctgacaaaatttgatgtccctatgtttgatttagtaataattattgaattataaacttttaaaaataattttaaaaccttaaaatcattattctagaattaatgtggaaaacactgcaaggaagccaactaaagacactcctctagggctggagagatggctcagaggttaagagcaccgactgctcttccagaggtcctgagttcaattcccagcaaccacatggtggctcacaaccatctgttatgagatctggtgccctcttctggtgtgcagatatacatggaagcagaatgttgtatacataataaataaataaaatcttaaaaaaaaaaaaagacactcctctaatagcctgggtgaaaactaaggtagggctgaaatgaagtgtgttgcatagcaaaagaaaaatattatataaaagacaatgaggacatcaataaaggaaagaagtgagatggaaattggaatttattttgtgtaaggcacaggaacccagaaaaaaatatataatcaaataagttaaacaaagcctatgcatatgttaaacatatataaatggaggtctgggtaccattgtaaaccaggcattaacaggagcacaagataaaattaaagagatataagaacagctttatcaaaagtctttaatgcactaaacattaagtaaaatttgccacttacctgcacctctctgataacctgtaagcaatcaggcatggagaagccaataggtagaccaactttagctggtgttttgaatttgtctcctattttgaatgggacatcatcaaggtaactgaaagtccctataataataataacaaaaaaacgcagaaaacatgagcaaatgaccttaatacttattttactataatctcaggctttgtgaacacacattcatttatgctttcctaagacctgagtcccttctccaatagcttacctgacctgagaccagtctactagtctacttcactacgagggtttgttttcaatgtaaaatccaaagaacttgctgggtgtggtgcatggctttaatcccagcactccaggggtaaaggcaggtagagctctgtgagttcaaagccaggacaaccagggctataaagagaaaccgtcttaaaaaacaaaacaaaacaaaaatccaaagtactcactcacagctgcctaaaaaagcttcctaggatctttctgtccacatctcctaacaacttaggcttaccaccctaagtaatggggacctctgtctgaaatgatgtcaagctcaatcctgcctcacaatgttccacactggctgtttctttatctggaatgctgttcacttggattcatataactcactccttcacatcttcaactctgttcaaatgtttctcagccagggttaacctcagcatcctacagaaaatgactacctacctcactactcacaatctgacttggccttaaaagtattatcttctaacacattctgtagctgttttattatccttattgtttgtattgcccaaggaaacataagcttcttaagccaagtcaatttaagtcttatctgaagatgtagtctcaaaatcatttttgtttgggttgttcagttttgtttggaagatgaggccttggtaccagtcctgactggtcttgagctcacaatccaacctcatcctcaagtatctgggattacagtgtatgtcaccagatggagcttgtattctcagaacctgacacacatctgtctgaattgataagactcctcacaacaggtgtctttgatttagcgttctctatgaacttttttctttccttttagggggcgtggggagtagatatcagtgaaacaatcttaaaaaaaaaaaaatacaaacaataggaatactattattttctagaataatatggatttctaccacacccccagtcctagagaatcaaacccatggccatgtctcagatatgtgaagtatacagctattatggagtatcactttaactacgtgaagatgtgttccatttctttatgctgaggagtatgactttaactctgtaaatgtgtgtcacatttgtttatgctacatttgttttatgatgtaaggatgtgttacatgtgtttgtgctgcatttgtctaactatgtaaaggtgtgttttattttttatttagcctttcgtgaataaggcacctgattagtctaataaaaaactaaacagccaatagctaggcaggagagagataggcgaacctggtaggcagagagaacaagagaaaagggagaacaagggaaaaagaaaggggattaagttataagaactagtaggtaatcacaagtgttgtaatttaagaaaagcagctggcaagagaaagacgccaagtaaagggtccaagtagagatttttttgttttgtttttaattggggaaagggattagaaaaaggggaaggggagaccagcctcagaagaagagagaggcccatgtgcagtattgtgcaaaccctctaggaaagactctgaagaccacagtttaaatagccatttgaagaaacacttaaattattgaaggtcttaggatgcacatgttgtgttttgtacaaactttgtttcactgatatctactccccacgccccctaaaaggaaagaaaaaagttcatagagaacgctaaatcaaagacacctgttgtgaggagtcttatcaattcagacaactttgtttatgctattcagtataaagaaacaacaacaaaatactgttaacttaaattttctgatcaaatcatagcttaaaccataatatctaacttcacttaccatgaaaatctgaacccaacttcttagaagccatttagaacctaaaaaacaagttaagatttcttaggtaatatgtcttaagacatcattaaccagaaaataaagacaccccccccccaaaaaaaaaaaaacaaaaacaaacaaaaaaaaacaaaaacaaaaacagtattaatgtttcagggctcacatagtcttcacttctcactcctaaagtcttccaaaagaaggcccaatataggagaaattcattagtttatctttcttttctttttgtttttccttatttttttcttttttcaggatagccctgactatcctggaactcactctgtataacaggatagcctcaaaatcacaaaaatctgcctgtctctgcctctcgagtactaggattaaaaaggtgtgcaccaccaccgcctggtctcatttttaaggtacattttatttgtgtgtgttacatacatgtgtgatgcctacaatgcttggccggagattagaggacaactttgtagagttaattctctcttccatgatgcgggtcccagggatcagatccagcctgtcaagcttggcagcaagcgcctttacctgacaagccatcttgccagcccaaagaaataaggtttttaaacggaaacatcaagctaggtaggatgactcacacatatattactaacacttgggagacagaggcaggagggccagcctggtctacgcaatgagtttcaaacttgcctggacagaagagactccatctcgaaaacaaaaaattctaaaaggaaatttaaatattcctaaatgtgcagggtctgaggaaatattagaagaacagcatactggtagccagctaccaattatatgctggccacaaaagaaaacttactaagctgatcatcctatataaatgacaaatgtacaaacaccgagtaagaaatgtgttttactttgtgtagttaagcaaatgtagatctctgactggctcatcactgtcaaaactaaaatttctggaatgggggaatttacaccttacaaccttttgtggcacatgaatgagaggataatggaaaagcattcgtatttccaattgaatgttcacaataagtgacactgtatatgactatcaagttacacatagtgatacctttacctaagacagatgtgagtgggaaatgcctgaaatcccagcacttggggggccaaagcaggaagggctgcaatctggtagccaacctgaactacacggtgaggtcagatgagaggaagagggggaaacaaagaggaatagaggagggaaagaaaataaaaagaaggaaggggaaggtaaggaaggaaaaaagaaagcctttactaataaaataaaaagctgacaactacatattagtctaattttgttcacttacttttcataatatcactaaacctgaaatcagaaaacaggaaattattttcctctagcacatatacaataagcatctcagatttggctgtttggtttatttattcacttatttctgaggtaagatctcactatgtatctctggctagcctggaactcgctctgtagaccaggttggcctcaaactcagatccacctgcctctgcctcccaaatgctgggattaaaggcatgcatctccatgccagatggaagtttattataatttgaaaagaaaaattttgaaatttgctcttacataaactaagctagtctcaaactaactatatggctgaaggtgaccccgaaatcctgatcccactgcctccagtgctgggatacagacaagtgaccataccaagtttacaaggtgtggggatcaaatccagagctttgtgcctgctaggcagcattctaccaagtaaggtacattcccagcactttaaaaaaaataaataaataactttataaactgcctatcatgcaggtagaattcaataaaggttgaactgaagtaacttgcaaaagaaaaaaaaaaaaaacatttttaagcattgtacctaaccattaaactggtatatctatggacagaaactgtaaacttttagttggatgtggatgtaatagtattagaatcttggtttcagctgggtggtggtggtggctcaacctttaatcccagtacttaggaggcagaggtagtcagatctctgagttcgaggccagactggtctacagagtgagttccaggttagccagaactacacagagaaaaaccctgtctcaaaaaaaaaaaaaaaagaatcttgattttataagttaaaacatgtctctgaagaccaagtttattgggtctgaattttagtctaagtctaataacaaatcagacacgactttcataatctatcactgtccaaaagctctatgtttgaaaactagacctcctttttagagactattcacatcagtcaagaggtcaacacagtatcctgactgatactgggtcccaggaagctctttatgtattaatttcttctcttaattgttcagattgttcagaatctgattattcagatctttcttaaacatcactgttccatgaagaactagaatgaaaaatttaaatcattaatttgcagaataagatctgatgagctcttacattttagaaaaggagccaatgtggagagatggctcagaggttaatatcactgactcctcttccagaggtcctgagttcaattcccagcaaccacatggtggctcacaaccatccgttatgagatctggtaccctcttctggtgtgcagatatacatggaagcagaatgttgtatacataataaataaataaaatcttttataaaaaaaaaaaagaaaaaaaaaggagccaatgtactactgtactacagaaacaaagaaagatattcttataatgggtgctaagactataggtgggcttcaggctttcattttgtactatttattttcagttttctatattgagtatgtctctctatatgtatcaatcatttaacccacctagagaattaaaaagaaacacagtgatgtgtaagtaatcaaaagttttcacctcaaaacaagaaaaataaatgaagaagagctcagtaacttctagtccaataagaatacccaatagtggggggtgggggtggaatggagatgtcttagagatgtaacagttattattaactatacagggaacaatgtccaagaagagctcagttacgaattgccacaatatataaaatgtccactcaaactgccaaagatagtaactactcaagcactagactaatggagtctatatccagtctttggtgttggggtggttttgtctgtttttgaggtgagacctctctgagctagtcttgtactatatgtagtcccaaaatagcctcaaggtaccacaacaagatatcagaatacccttttatgtttttattttaacatctgttatgtctatgccacatatgccacagaagcatatggagtgcatcagatcccctgaagctttaattactaggggatgtgagagccacctgaaatgattgctgggaaatgaacttgagtcctctgtgggttcaaggccagtctgatctatagagctagttccaggtcagtcaaggctccagaacgaaaccctgtctcgaaaaaactaaaaaacaaacaaaaaaactcaaagcaaaaacaaacaacaacaaaaatcatcttttctgagttcaaaagccttctcacttacctggggagttacacacacacacacacacacacacacacacacacacacacacacacacacacacacacacacacccacagaggtgagatggctcaggggctaaaatgctgtgtgaagcatgaggacccaatctcagatccccagtagccatacagaagaggggctaaagacatggttaacagtactcccacgggaacaaacacaaactcacacacaccctctagttaccagaattggactgttccagtaaagtaaaaagtcatcaatatcagcttgataaagaaacactctaaagtcctagccctattctctggagaaatggctaattaaggctattgtaatctgaaaagcattccccatggccaatgtgaaaaagtctcagaaagcagtgcagaatttttaacccaaagggtaaagtaagtgcacttaggcacatactgaggtcacctaacagctaacacccatttcagatcttgtaattttccaaaaacaaaccaaaagtgaagtccattctccaaaatacctggcagttttcccaagtttgttttttcttttccttttttcttttgtttgtttttctttgtagctctggctgttctggaactccctctgtaaaccagacttaccttgaacttggagatccacctgcctctgccacccaaatgatgggattgactatcctaatctaaaaatcagactgaagagtacttcctgcagttccatccaacacaaagcccaagctcagacacactgaaccagaacagccagcaaccccaccaaatttggaacactgcttaccaacagcccttcccagacagactacagccaagggacaccacccaaccatagggcacaacatgcagctcacacaattgcagagcccaatttacagccagctcatctatgaaatagagcatgcagcccaatctgtccaaggatagcagagcctacaatcctcccatcataaaattcagccagaagcatcctgaacatgaagcccagccaaaagacccaccaacaagagcccagccagaagcccttctcagtctcaaaacagacagcattttggttggttccaccaaatcccagctgcaagctattaaaacacacacacacacagagagagagagagagagagagagagagagagagagagagagagagagagagagacccacactccaaatgacccgagtgccatctccagaacccatggtcaaagaaaaaaaatcaactctcagaagttctctatactccacacatacaccatggcaaatgcacacccatacttacacacacatatatgcacacactcacaataaaataaatataatatgtgggtgatttaacatcccccccaaaacagaatctcactatatagctttggttggtcttgaacccagagatcctcccgcctctgcctcccaagtgctgggattaaaggcatgtaaaactatgcctggtatacatctttttaagcaaaaataagtaagagccaggtatgtgctgtttttctgtcagcttagtagtttcagattaatctatgatattttcattattgttctccaccccatgcccccccccagtcaatgccccaatagcctggtagggcttccagtcctgcagtgtcgtggggcactgaatgaggggccatgggatagcagatgagtatcagtagattcatctgcagccactaagctgacagaaaaacatcatttgatgccccgtgttggacaccatatgtagtcggacattcctttgggacgccaactcaaataatgacatgcagacttattaattatgagagcctgaccttagcttaagcttgtcccactagctcttataccttaaattagcttgcttttactaatctatgtcttatcatgtggctatctacctttctttccattctgtatgtccaactccctcatgtcttgtcagcatctcatctatcccgatcatctcctacttcctctctctacctgaagcaccacctatagctcctgcctagctactggtgattcagattttattaaaccaatcacagtaatagatcttcactcagggtacaaacatcacacaacagatacggtggcacatgcctttaatatcaatactcaggacacagagcaggatatcactgactttgaaggcagcctggtctacatactgaaaccctgtctccaaaggggtgtgagaaggggatgacaactgactccatggagaccaggcagatacatgatgcacatatatacatgcaggcaaaatatggggctagagagatggcttagcggttaagcattggctgctcttccagagaacctgggttcaattctcagcacccacatggaggctcacaactgtctataactccagttccagaggatctgataccttcataccaatgtacataaaataaagttaaataaactttttttaaaaagggggggggacaaggcgggcaggggtggtgcatgcctttaatcctagcacttgggaggcagagacagacagatctctgtgagttcaagaccagtctggttgggctggagagatggctcagaggttaagagcactgactgcttttccagaggtcctgagttcaattcccagcaaccacatggtggctcacaaccatccgttatgagatctggtgccctcttctggtgtgcagatacacatggaagcagaatgttgtatgcatagtaaataaataaaatcttaaaaaaaaaaaaaagaaagaaaccagcctgatctacaagaggcagttccaggacaggctccaaagctacacagggaaaccctgtctcggaaaaccaaaaaaaagaaagaaagaaagaaagaaaaaaagaaagaaagaaagaaagaaagaaagcagggtgaactacacatggagagcaagccagtaagcaatattcctccatggtctctgcttcagtgcctgccctggcttccctcaataatgcactgtgacctgtgagttataagatgaaataaactctttcctccccaggttgcttttggtcagttttatcacagcaacaaaaaagtaactggtacacccagctttaaccatttttctttgtttgctttttactgctataatctgaggttgggtgatatatgaaagatagctggacctggtgatgaacacttgtggtcccagctactaagaatgccgagaagggagaagcatttgaactcttggattcaagaccagcctaagcaacatgataaagaactttttttaaaaaagtaagaggtgaaaatcatctcaatttgaggctgaaaagtcccaacagcataccaagttttttgagaacctcactgtgctagcagcacctgccagaggcatcacacaggaaagcagaagaggccaattttgctgttttgttttctaattatatgtaggtatgcgcctgcacatgggtatgtgcacgtggtacaggtgcccacagagactagacatggatcacccagactgcagttacacacaactgtgagactcctgatgtgagtgctgagaaccaaactcaggtcatctgaggagcaagagtttttccatgagccatctccatctccctaaccgttctcttactctcttatgatcacaaactctttcaggatccaactggcattccatgggaagtatttcattatttccaagacaacacctccaatgtcccagtctacactgataggctccattgttttcttcttggtttattttctttttcctttttctttgagatgggatctcactatgtatcactggctggctgatatattatagatcagggtgaaggaaaagaggtcggcccacctttctgactccacttccaaagtgctggtttacaggtatgtaccaccacacccagcttattccatgtctagtggctcacaattccctgtaccttcagtttcagaagatctgttgtcttagtcacttttctagtgctgtaatcagacaccattaccaaggagcttatatttaaagagtttatttggggcttacagtttcagagcattagagtcagtgaccatgatgacacacagcaggcaacaggtaagcaagcatgtggcactgaaaaagtggttgagagcttatatcttgatccacaagcacgaggatgacattgagtctttgaaacctcaaagcctgcccccaatgacacacctcctccaacaaggccacacctcctaatccttcccaaacagttccattagctggggaccaagtagtcaaatatagagcctctgaggacctgatatcctcttctggcctctgcaggcaactacatatatgtagcatacatacacaggcatagacacatacacagaaataaaaacagtgaaaataaatcctaaaaacaaatagcaaatacacacacacacacacacacacacacacacacacacacacctactctttggtcttcctaagccaaaaattcctgataagttctcttttcttttttttcctttcaagtcaagggttcatacagagcaggttggcctcaagtgtcaaactgcacactacactgatgtagtattatatttattgaaaaagcaggcaggttgtgatgcagcttagtggtaggacacttgcctagcatgtacaagtctttagtcaagccccagtaccaaaattaaaagaagaaattgtttaaaatagcatgggggggcaaaaagagtttctttttttgttttgttttgttgttgtttttggtttgttttttgagacaggctttttctatgtaacttccctggctgtcctagaactagttctgtagaccaggttggtcttaatctcacacagatctacctgcctctgcctcctaagtgctggaatcaaaggagnnnnnnnnnnnatttaatttaaaaaaaaaaagttatactgataaacagtagtggcacacacctttgatcccagaacttgggaggcagaggcagatggatctctgggagttcaaggccagcctggtctacagagcaagttccagggcagccagagctacagagaaaccctgtctcaaaaaaacaaacaaacaaacagttataaaagaccgaaaagcagtcgggtgttggtggcccacatgcctttaatcccaacactggggaggcagagacagggggatctctgtgagttcgaggccagcctggtctccagagcgactgccaggataagctccaaagctacacagggaaaccctgtctctaaaaaccaaaaaaaaaaaaaaaaagactgaaaagttcaaagttcattaaaacgagttttagcaccgggcaatgatggctcacacctctaatcccagcactcaggaagcaaaagtatctatgtgagttcgaggccagcctggtctacagagtgagtaccaggacaacctccaaagcaatgcaaagaaaccctgtctcaaagggaaaaaaaaaagttttagcaagatgtgggactacacagctagtcccagagcttaggaggcacagaaaaggacactgactaaagttcaggccagccaaagctatgtaatcaaaccctgtctcaaaatcaacaaggccagcaagatggctcagcaagcctgatgagcagagttcaaaccccaggatctacatggtagaagaaaagactcccataacttgtcctctcacctcaaacatatgtctgtcatgtaatgtcttaaaaatcaacacaaaagccaggtgttggtggtgcacacctttaatcccagaacttaggaggcagaggcagtcagatctctgtgagttcgaaggcagcctggtctacagagcaagttctaggacaggctccaaagctaaagaaaaaccctgtctcaaaaaaccaaataaaaaaaattaaaaaaaaaaaaatcaacacaaaaaagatcatgggctactcttaccaaaaggcataaactgataaaaaaaagtcataatacaagaggatggtcataagtcatacattaaaaaataagtgtgtggtggtgaattaagtgtgaatgtgtgtggttttacacctgtgatcccagcacctgcagaaggatcaggagttcaaggccagtctggactacaccaagaccctgtctcaaaagataaccagaataaagaaatcttactcaaccaggaagagaaagaatccaaagtaatgacaaaaaataaaaaatacaaacacaagttgccaacaaacacatgaaaacaaaaacaagctcaatgttaggaaataccaatttaaaaatcatacaacaggtaccattttaaatcccccagatgagaaaaaaagttaaagtttcacaatatcaagtgctgaagaggaaaatgaagcaaccaaaacacatactggtagcctcttgactcagtcatgacaagattttaccatgagccagtgcagtgactcaaatacgggaagtgtttaataagcaatgagcaaagatgctggcacaagcctctaatcccagaagctgaggcaggagaacagcttgaggacagcctggtctacatagagagttccaggacacctagggttgttacacagagaaaccctgtctcaaaacaaacaacaaacaaaaactagcacttaaacttcataggaagtgaaacatccctgtgactacctaagaggggcactcataattatcaatcacactgaacaaatttgaattcagattcagattcgccatttaaaactgtaatctggccaggtggtggcccatgcctctcattgcagcctggtctacagaggaagttctaggactgccagggctacacagagaaacactgtctcctggggggataagaaaagtaaaactattatatgttttaaataagcatttggaagatcgggtgttggtggtgcacacctttactcccagcactcgggaggcagagtgtgactttgagaccagcctggtctacagagatagttctagggcaagctccaaagcaatacagagaaaccctgtctcaaaaaacaaaacaaagcatttgatagagaaataaaaaacacatttcttaagaacaccagtgccctgagttaatggcagttaaaacattggctgcttttacaagggacccagtctcaattcccagcagtcatatggaggctaacaactgtctactccaaagatctgatgccttctcctgctttctacaggcaccaggcacacccagagtgcacagacctacctagatacaggaaaaacaccataaatataaaatcaaaataaatctttacaaagaaagactaccagatttcagctctaagagatccaacaactctagtttctgcaggtaactgcattcatgtgtacatacccacactcagacatacacacctacatataattaaaaaataaaaatgaaaattggaagaaaaacaaaaaagactatcatcattactaccaatggctcagcaagtgaaggcacttgctgccaagccaggcacaattccctaaaaacacatcatttgaaggaaggtgcaaactccttgcaaactgtccttacctccacagacatgcccagttcatactaaaacaaataaatgcagggaggaaaaaaaaaaaaaaggaaatgttatccaccttattaatgataaacaaattatttttttctgtttactgaagaaacaaaggttgttcttaaaaggaactgcacttaagacagggtctctcacagaaccaggagctcaaagatttggctacattatctgactaatgagtcccagatagcatcctgtctccacctccccagtgctaaactgtaaaggcacaccactagaatacccacctttttctttttgttacttgagacagggtttctctgtagcttggagcctatcctggaactcgctctgtagacgagtctggcctcaaactcacagagatctgactgcctctaactcctgagtgctgggattaaaggcatgtgccaccaccgcccagggaatacctaggcttttggcaatatccagccttttaacgtgtggatccaaactcaggtcttcaagattaagaagcaagcagttcacagactgagacttctctcaggctctccagttaatcttgatcaaaatcttaatactgggtgggtgtgtctgtgtgtgccctcctttgtgcaagaacaggcctttgatcccagcattaaggaggcagaggcaggcagatctatgagtttgaggccagcctgatctacagagttccaagacaaccagggctacacagaaaaaccctgtctcaaaccaaccaaccaaacaaaaaaccaatgtaaatacatccaacaatgtaacagaaaaaaagatagcagtgtctatactcagaaataatgatgtatttaaaatgctgaaaatattcacaagaacttatatcatcaattacatttcaggaaccctaagctttggaggctgtcctggaactagctcttgtagaccaggctggtctcgaactcacagagatccacctgcctctgcctccctagtgctgggatcaaaggcgtgcgccaccaaagcccggctagtaattttttttttttttttggatactgttttctcaaaatcaaaataaaaaaataaaagcagccaagtgtggtggtaaacacctttaatcctcaaactctctcagaaaacaagatgatctgagtccagtctggtttacagggttctaggtcaaccagggttacatactgagacatagtctcaaataaaaaagagaagggaaaaggtgtgttggagagagagcacagaggttaagagagagcactatctcctcttccaaggacccaaatcaagtcccagcacccacacagcagctttcaactatgtgaaactccagttccaggacaccctcttctatgcacagacatacatataggcaagatacctatacacatataaataaagaaaaataaaattaaaagaaacaaaaacagacacataaaatgtcatgatgaaacaaagtagaaattcacctgggtggtggagcacacctttaatcccagcactaaggaggcagaggcaggtgaatctctgtaaattccaagccagcctggtctacaaagtgagttccaggacaggctccaatgctacacagagaaaccctgtcttggaaaacaatgaactagaaacaaaaactagttccaggacagcctgggctacacacagaaaccctgtttcaggaaaaaaaaaaaaaaaagtaaaagaaaaaaaagttttaggttgggcttggaagaggaaaaaataaaagtttttagatttacttgtttcatgtgtatgagtgttttgccttcatgttgtatgtatatccacagattcctgccttgtaacagtggaaatcagaaaaaggcatcatatcccctggaactggagttatggatgactgtgtgccaccatgtggggacagagttgaactcaggtcccctgcaagagtaagtgctctaaattgctcagccctctatccagcccctaagaagagctgtttaccaatgaaaacgaaatgcttgttttaccatcaaatctgagaaacttcaacagagaagcatccaccatatttattcaaattcccaaatactaacaattagaacttgcaaactgtccttacctccacagacatgcccagttcatactaaagcaaacaaataaatgcagggagggaaaaaaaggaaatgttgtctactaacaattaaatactaacaattagaactgaggaaataaagcactaatagtgaaaattagagccgaatatagaatacaggacacattttggtttacaacactctatgatgtctaaaacgtatcaaaatcttactgcagttcaacacaaaaaatttttaagcaatcctatttctaagtctcaagtcagaaaacaattacatgaggcaacaacacaaaggtcggggatcgctggtaaagagcaaatgcttggcttcagaagaaagacttggggttgtttatgagacccaggtgggtagcccaggtaatttccacccagggaaaaacaaaatcaaaaaaaacaaacaaacaaacaaacaaaaaaaaaaaaaaacaggaaaatctagagaagatatagctacagaagaccaggcaatgccaaagatacccccaaaatcattcactcctggtctgatctctttttctccctcctctcatcgcccaaataactannnnnnnnnnnnnnnnnnnnnnnnnnnnnnnnnnnnnnnnnnnnnnnnnnnnnnnnnnnnnnnnnnnnnnnnnnnnnnnnnnnnnnnnnnnnnnnnnnnnnnnnnnnnnnnnnnnnnnnnnnnnnnnnnnnnnnnnnnnnnnnnnnnnnnnnnnnnnnnnnnnnnnnnnnnnnnnnnnnnnnnnnnnnnnnnnnnnnnnnnnnnnnnnnnnnnnnnnnnnnnnnnnnnnnnnnnnnnnnnnnnnnnnnnnnnnnnnnnnnnnnnnnnnnnnnnnnnnnnnnnnnnnnnnnnnnnnnnnnnnnnnnnnnnnnnnnnnnnnnnnnnnnnnnnnnnnnnnnnnnnnnnnnnnnnnnnnnnnnnnnnnnnnnnnnnnnnnnnnnnnnnnnnnnnnnnnnnnnnnnnnnnnnnnnnnnnnnnnnnnnnnnnnnnnnnnnnnnnnnnnnnnnnnnnnnnnnnnnnnnnnnnnnnnnnnnnnnnnnnnnnnnnnnnnnnnnnnnnnnnnnnnnnnnnnnnnnnnnnnnnnnnnncagtgacgtaactaaatccctcttctagagccgaaggatccctgaaacctggagctttaattctgaaatgaccaccctgctggcccagagaaaaagaagaaaggagaggtcactgagagggtaagactgagggttagagaccaaagcggccaaagcgagaaccctagagacttgaatcgcgagaacacacccaaaagcttagccttgaatcccctttggcaattagaaaacctctaagactctgggaccagttccatcctccttaggtctcgctttctgcatttattttggggttttgttgttttccagactgggtcctatgtactccagacccacgtttataaataaagtgcataaacaataactctaaatgtctcttcaattttaacttccagtacattcaaaccagaaatgcaatctcaagccttcactgctttccgtgtattagatatttgctggaaacaggcgcatggagaattcatgattgtattaagtggtttttttctaaaatttcatgatcaatggggaaatgatatcataaagagttaactagtcaaaatcagatgattgtgtgacaggtgcttagtaatcaaaccagagcatctttaggtggcatcaggtgctttgatcaagaattacacctcttggtacataaagcatgtgtacactaccatatctgcctttctagccacattttgaacttaagtagcagacaagatgatatttgaactttggagtttgaggaagctctaactctgggtgcagcattccagagagggaggtcagggtgagcaaagaacagcagcctgtaacctttgggttatttgtgtattcggcaggttgatttacactttgtatattaagttcaccattttctatatcaaggcaaggtctgtcattgaatctaggactcactgattcttgctagtctagttagccagctggcccaaaggatgtacttgactccactttctaagtgagtgtggcaattacaggtagatgtcttatctccctgactttcatggtttttatgtgggttctgggaatcctcaagtttatgcatttggggtttcacccactgagccaccttttcagtcccttgaaattatctttgtagagttatgatgacaggcatacagtgggacttagtcaatgttagatggctaaatgatagattatggagaaagtgggttggcctgtccttttaaacatttcagatgcctagtggatgaaagggacaaaataaagtataagctggtgtcccttgctctgcagtgctgctttaggcttaaacatgtacttctgtgtaggtaaactgggatgggaagacagggtgaagacagggatcctgcatgatctgttctggccctgtgtgagtcaccactgggattcacacccggaaactgacaaatatgaacaacttccaggaaggtgaagaggtatttgtttttctagggaaatgtctctggttccccctataccctacactaatggttctcagctctcctaatgctgaggtacttatgaaattcctcatgttgtgatgaccccaaccatagcattatttttgttgttatttcatacctgtaattttgctactgttatggattgtaatgtaaatatctgtgtttcccaatgttcttaggcaatccttgtgaaagggtcatttgaaagggttgaaaaccactgcctacacctttgttctgttttatagaaaccctacacagagctgggcggtggtggcccacgcctttaatcccagcactcgggaggcagaggcaggcagatctctgtgtgcttgaggccagcctggtctacagagtaagttccaggccaggttccaaagcaatacagagaaaacctgtctgaaaaaaaaaaaaaaaggacagaaaaaggcatgaagaaacataggaagagtaagttccaggccaggttccaaagcaatacagagaaaacctgtctgaaaaaaaaaaaagaaagaaagaaggaaggaagggagggagggagggagggaggaaggaaggaaggaaaccctacacaaacagggtttttctgtgtagtcttttttttttttttttggtttttcgagacagagtttctctctttagctttggagcctctcctggcactcactctggagaccaggctggcctcgaactgaactcacatagatccgcctgcctctgcctgccgagtgctgggattaaagacatgcgccaccaacgcaacgtggctctgtgtagtgttgtagcctttgctgccctgaaactctgcagaccaggttgtcctttaacaaatcctgagtgctggtattaaagtcgactgcccagcaactctgaatataaggcagaaagtcttagcaacaaaggaagggacccagcttctaaacgtttatattattattattggcatggtgagtgtgtcatagcctgaatgtggggatcagaggacagctttgtggaattgtctgtcaccttcctcccttacaagggttccatgaatcactagcattaaataaaacaggattggtggactggagaaatgccttggtggtttagaatacattctgcacttctagcactaatcaaaataaaagtaagaaacaaacaacaaacaaaacaaacagatttcgaggttacaccttaatctacatcaattaacccttaaaattaaccatcaaaggttagggatatggtgaagtgctggagcatctgtctcacatgttcagcaaggccctggctctgtactagggaaaaagacactgtctaatcatgacgtgggattcaaaagccagactttatgctgctaaaatgcccaatacacaaagtgaaaatataaactgaaggaagtgtggtctgttggtaagttggttatcttagtcctcaggaacccaagacaggaggtttgccagtagcttaaagccaacctgagctacacagtgggttttgaggtctgcctaagatatcatatgagacccaatctcaaaaacagaaaaagagctgggcagtggtggggcacacctttaactcaagcacatccatggcagaggcaggtggatctctgtgagctcaaggccagcctgctctacagattgagtttcagggcagtctccaaagctacagagaaacgctgtctcaaaacaaaacaaaacaaaaagaaaggaaaaaaggaaaaaagaaaggaagaaaggaaaaaagaaaggaagaaagaagagcttggcatctatggaggcaggtggaagcattttaggaagacatgggtgacaggagttcctgaaagccacctctccaagcccagaacatcagaagacctcaatgattatttcatttgtttctgaggcccattatctatgacaaggagatggccctcagaaatgtagaaaggttcctctggagggggaaaaatggcaaacggtgtttacagctttgctcctgtcagggttgagtgccagatgtttccctctggattccaagattgtgttattagctctaaaaggcttccttgcccaaagataaaggaatacacaacttgcccgaagatagtgcagatacatgggcaagttaatcctacattaggacagcaaagttccctttgctgctatctgagctcaaagtttggagttggcaatatagtcttatctttcctctctctccctctgtcttagggttttattgctgtgaagagacaccatgatcatggcaactcctttttttttcatcgtttttttcttacataccaatcacagtttccccttcctcctgtcctcccattcctgccctccacctctcttctaccctgctgccactcctcctctgtcgccactcagaaggggtaaggcctcctgagtgaattaacaaagcatggcatatcaagttgaagcaggaccaagctcctccccctgtatcaaggctgaacgagtcatcccacccatagggaatagattccaaagagccagctcatgcatcagggacaggcactggtcccactattaggggccccacaaaagaccaagctacacaactgtcacccaggtgcaaagggcctaggtcagtccctagctgtctgtccagagtccatgacccccacaagttcaggtcagctaactctgtggtttccctgtcatgataataacccccccacacacacttgctcatataatccctccatcctctcttcatttggactcctggagttcagcccagtgctcagcccagtacttgggtggaccatggcaactcttatgaaggaaaacatttaattggggctggcttacccttcagagatttatgatcatgacaggaagcatggtggcatgcaggcaaactggctcgggagatggagctgagacctctacatctgatcaacaggcagcaggaagagacagaaacgcactggacctggcttgagcttcttagatctcaaaggatgccccagtgatacacttcctccaacaaggccacacctactcctccaagagcataactcctaagagtgccacttcctggggggtcattttctttcaaaccattatgctctccctcccttcctttcctcccgctttgccttcttcctgcccttccttccttttatttcctccctatatccctgcctctgctctccctccctcccttccttctcttatttttttttaggatggcctgggcagggggtacatgcctatagtcccagcgagcaggaggcagaggcaggcagacctctgtgagttcgagaccaacctggtctacatatcaagtccaagacagccatggctacatattgagaatctctcaaaaaataataataataataacaaatgaaaaaaaaaaggcttcatagggcttggtggtacatgcctccaccttcaatcccagcactcagcagccaaacactagtgtgtttgtgagttcaaggccagcttggtctagatagtgatttccaggtcagcctgagctacatactgagatctggtctcaaaacgaacaaataagaaaccaaaccaaaaaaaaaaaaaaaatacacacacaccaaagcttagacagaatacatatactgagaaaactcacaaaaagtccatttcctaccaagaaataaccctaggagtctgatgaaaatggcactaacataaccaagaaactcagttgtagctgcccctgtattttcagaacagggctccttgataaaaatgaaagtggagagaccacaaaacaatagaaatagtgcccatggaagatgcaattaccataatgagctgtaaggctagactgttattgttttgtttaaaaagaagaaaagagaaattgctgagccagacatattgactataagtttattataaggcccgtcagaatggggagactaagaagaggaacagggtaatggctgaccgccatggccggttgccacagagagacagagcggggaaacagagagacaggagacagagagagagagacagggggagagagagcgtaaaggggcagggcctatcttttaaaggggtcctctgcacctgtgtgcagacttctttcccatggaaccttgggctgaccagggtattgcctgagtggattccaccaggtaacaggggcaggccagcataatgcctgaacctttcatagacccaatgtctctaagggtctcaaaaagaagctattcaacctagactctcaaaagatgatgaagatgttgagtcatgattcattgtccagttactgaccagaaccagtttcagatctggaacccaaatgccagaaagagatggcaagatactacatgataaatgtctacagtagtgaaaacctgtcattcctcaaagaggtcatctccttttgtttggggagccaaacaaaggagaaagggcagtgccacctaggcaattcagggactcttagatgtagagtcagagttggagttgtgtgtgtgtgtgtgtgtgtgtatgtgtatgtatgtgtgtgtgtatgtatgtatgtatgtagtatatcactagagtctgcaagatggagtggaggcaaatgcagaatcgtggcccaggtttagttcacagtgaatccactgtatggacagatatacccagtggcaatttccccagttcccatgcatttaaattaaattgttgggtctggagagatggctcagctgttatgagcactggctgctcttccagaggacccaggctcaattcccatcacccacatcacaactgtctgtaactctgattccagtgaatctgacaccctcacacagacagacatatagacagaaaaccagtatacataaataaaaataatttgatgagagatcaatccacagtccgtaacgctaaggttttctttattcagataacaccagccaagcgcaagccaaagcggaccaggggcagcagggcagcagggcagccaggccagagagaagggagaagggagaagagggtctctacgtgtgcacagtcccttaagaaccgttccgtccgtgtcaccttagacttccccctcaccacgcccctcaccgcacacctgtccaggctactaggaggcggggctacagtgtctccctacaataagtcattaaaaattagattgttacccggcagtggtggcacacacctttgattccagaacttgggaggcagagacaggtggatctctgtgagtttgaagccagcctggtctacagagtgagttccaggacaggctccaaagttacacagaagaaggaaggaaggaaggaaggaaggaaggaaggaaggaaggaaggaagggaggaaggaaggaaggaaaaggatagaaattaaaaaaaaataaattgttaggctcagtagttaacagaataactacactggtcacatgacttgtgacgcaagtgttaaggtggaagcttcaccccagcctctggcctccatatacccaaagagtctgggatgttatggtgaaagttccacacacccacccctaccccatccccatctccctccaaaccctgctgcatctcagaaagtctgccaaatgatgccctcccccagagatactcaagatcactcccacagggtatttagtgtcccccagagaacagactctttcctgggggacactttcctggtctctctttccctgtctcctctatggggggggggctggaaggccaccagggagctctgtatccattaatcatgggctttttctggcttggtttgatttggtctgatttggattgctacaacggcagagaggcttatttaggtgtagaactatgtcagctaatggaaaatgtcaaatagaaaccagccaagatagcaattaaaaacatggccgaggctgggcagtaatggcacatgcctttaatcccagcacccaggaagcagaggcaggttgatcactgaattcgaggccagcctgttctacagagtgagttccaggacagccagggctacacagagaaactctgtctggtgggtggttgggacgaggctgaggatgtagctcagtgcagggcactggcctattatgaggaaggccctgggcatcacacacaaaatcacatcttgtagataagggcagaaatcaatgataacctgaaggagttaaaagatgaaatgtggctgtgtgtggtggcacacacctttaatcccagcagaggcaggtgtatctctgaagtccattccaacctagtctatatagccaaatttcaggacagccagagggttccaaatacatggaacgaagtgctacatggcgagatcctgtctcaaaacccaaacaaagacatgcagagtggagtcagaaataaagctctatggttgagtgcatgcttacagcacacaaggccctgagttcattccccagccacaaaataaacatgaaaaagtaaatagaatttgccccatctttttatttatacagaatgtcattatgtagcctagaacttgatttgtaggctggccttgaactcataaaccagctccttgttttatttcgtaatcttatccgggggtgtgtgtgtgtgtgtgtgtgtgtgtgtgtgtgtgtgtgtgtgtgtgtgtgtgctcatgtgaaagttaaatgaaaaaataaaaataaaaaggaaagacttgactactcccagtatggtgaaggagaaagtttattgtaaataaaggaagaacatagccagagtcagagacagctggtagagtccaaagtgaacatgaccctgaaccatgtgaggagggggggagccaggtgcaacagccaagagagcaaagttacaaaaagggcagataaccaaaatggttggatcatatagggatcaagagcagtccaacgccctgggctggatattttagagtagggacaggatatacaagccaatagtgccctgtaacagataggggccaagggatgctgctggaagaacctggatgccagtttcatagtaatatgttaaataggcacctcagccatttgtcagaaggtttgagactcaacaaaagtcagaggacaacttacaggagttgagtcccttcttctaccaggtgggtcctgggaatcaaagttaggtcatcaagcttggcaacaagtgcctttaaccactgggcaatcttgcccttattttatgttcttttgttttgttttggtttttggtttttcaagacagtgtttctctgtggctttggaggctgtcctggaactggctcttatagaccaggctagtctcaaactcacagagatgattcatctctgtcaacttcctgcttcctggtcataaaactgtcttttggggaatgggttcaaggtcatccttatttctccaaagtgtcttctttcagttgatgaaggaagctccatcttgggttctttctgaacccgtgaaatctcatttgcctccagttcaaaataatccatatgccaaagagatatgctgaagcatcaccgctgtgatcagcttcacagataacagcacctgattctgactgttgaaaaaggggatccactggcaggacctggaggtgtccaaagtcttaatacacagctcagcctccaggttatggaaaatagaagtctgcatggtcactgtcttagggtttgtattgctgtggtaaaacaccataaccaaaagcaacttggaactgaaaagttttatttcattttacagtgtataagtccatcactgagggaagccaagacaggaacctggaagctggaactgactctgaggtaatggagaaatgctgcttactgccttgctcttcatggtttgctcaagtctgtttgcttgcttacttgctcgcctttttatttttttttggggggggagcaattcccagcacccacatggcaactcacaagtgtttgcaactctggttctagggaattcaacaacctcacatagacatacatgctggcaaagaaaagaaaagaaaaattcatattaataaaaaataaataagtcattaaaaaattaaattgctgccaggcatgggggtgtacacctttgatcctagtacttgaggggcagaggcaggtgaatctctgtgagtctgaggccagcctggtctacagtgcaagttctaggacaactagggctacatagagaaaccctgtcttgaaaacaaaacaaaattaaattgttatgcttggtagttaacagaataaccacactggtcacatgacctgatcaaattgcacacctttaatcccagtactcaggaggcagaggcagtcagctctctgtgagtctgaggccagcctggtctacagaacaagttccagaacaaccaggactgttacacagagaaaccctgtctcaaaaaaccaagagagagagagagagagagagagagagagggtccaaagtcagccaagataataattaaaaacaaggctgagtgtgtagctcagtgcaggacactcccctattacctcgaaggccctgggcagcacacacaaaatcacatcttgtgggtaagggcagaaatcaatgataccctgaaggagttaaaagatgaaatacactttccttttcaagatttatttactttcctttgtatgtattttgtcttcatataggtatataccatgtgcgtacaatgccagtgaaggccaggaaagggtatcagatcccatggaactggagttacagatggttgctagccacaatgtgggttctgggaacagaacgtgggtcctctggaagaacaaccagtgctcttaaccactgagccatccctccagtccctcagcctactttcttattgcatccaggaccaccggctcagtaatggcactgcctacagtgagctgtgcccttccacatcaagcatcagccaagaaaattcaccacaggcttgaccacagccaaagttccctgttcccaaatgattctggcttgtgtcaagttgtcataaacctaggcagcacagtgacacctataaccctgtaataccagcacttgagagatagaggtggcgtgaagatcacaagttcaagattatgcttggctatatgactcacagcaagtttgaagccagcttgggctacctgggacactgtctcagaaacaagaaacagagactggagagacagctcatcaattaacagtgcttgctgctcttccagaggacccatgttcaaactctccacccaatgttacacagttcactattgcctgtaaatctagctcgagtggatccaacaccctcttctgacctccatgtgtaccccacacacatagcctacactcacacagacacaaacacacatgaacaaaaacaaatctttacacacacacacacacacacacacacacacacacacacacacacacacacgggatacagcacacttggtagagtgttcatgaagccctgggttcagtccccagcaccataataaactcagcatagtgttgacaagcctgtaatctcagcactctagagatggaggcagaggatcaggaattcaaggtcatcctcgactacccagcaagtctgaagacaacctaagcgtcaagataccctgctgggaaagaaggaaggacaataaacggagtgtgctggtgcaccccactcccattcaatggataaaagcttttgccaggcaacctgaggacctgaattagctccctggatcacatggtggaaggaaagttgactctgaaagctgtcctctgaccttaacatgtgggttgttacctgcttgtgcccatatctatacaataatgataacttttttttttaaagggctggactgaaggtgcagctcaatgatatagtatagcacttgcctagcacatatgaggacgaggacatagattccatccgcagaactgccaagtaaagaaataaaataaaaagtagtcagcaatggtggcacttaatcctagcacttaagaggcagaggcaggcagatctctgccaattcgaagcgagcctggtctacatagagagttctgggccagccagagcagagtaagcccctgtctcaaaaaccaaaataaaatgtttgaaaataaaaaaaagaactctcagggctgacacttgggatgaatcaattgcagctatcactattttactctcaaaggattcagatcacagcagtcaagtatgtggctggcctaccttggcttgtaacacatagcccaggcagttgggcatttgttgtctgttttgatatcctgggtgagtggcagggcatcttcactgacacttccataattacagtgttcaaaaaggtacctgaatgtgctaacacatgcctggaatcccagtactagtgagtttgaggccacctgggatacatagataatgagttcataacaagcctgagccacatagatagtgaattcaaagatacactatgaggagggatggagcaatggctcagcagttaaaagcactggctgctcttccaaagtaaccaggtttggttcttagcatacacgtggcagctcacaactgcccttaactccagttccagaggatccacctcccattttttacctccgtgggcaccaggcacacatggtgtacgtacatacacataggcaaaacacttatacacatggaataaaaataatgcaaaaattacaaacatctatgtagtgaaaccctaaataaaaaaataaataaatcactttcataataatctagcgtatgtataataatacacagatcttttcatatgatcctcacaatggcctcgtatagtaggtattactatccctaagaaaagctcccagccactaggcagcatagacagtaaagagaagaagaaaaagggaaaacaaaaacaaacctctggggactggagcagtggctcagcagttaagagcactggctacttttccaaaggatctaggttcaattcctagcacaaacaaatgtctgtaacttcagttccaggggttcatcacccttttctgccctcctcaaacattacacacacatggtgcacagccatacaggcaaaacactcatactcacaaaataataaattaaaaaaatttaatccaggctggagagatggctcaggggttaagagcactgactgctctttcagaggacccgggttcaattcccagcatccacatggtatctaacaactgtctgtgactccaagatctgacaccctcacacacacacatacgtgccagaaaaacaccaatgcacatagaataaaacataaataaataaatcattaaaaaagttaatccccctactttgaaagccctcactagcgtcttttatatgttgggaaaaacaaatgtgtttgcatgtctgttgcacaacaatgaattgaacttcagccttgggcctactggtccaaatcaacttgtttcttgtactatacacataacatgtcacagaacatttctttctttctttctttctttcataatttttattttgttttttttaagattttatttatttattatgtatacgacattctgcttccatgtatatctgcacaccagaagagggcaccagatctcataacggatggttgtgagcctccatatggttgctgggaattgaactcaggacctctggaagagcagccggttgctcttaacctctgagccatctctccagccccacagaacatttctttaaggagatgaatgtgtatctcttccccactcattaattctccatgcatacaaatgggttttctttaaatgcaattcaattaggacattatctacatagtcagaatccagtctcagagatcaagagctcagtcccataaaactgctcatccccactacccaactctaccctcacctctgctttaaatctggctacccctaacttctggcccactggctagaattggtggctgccatcaccctctccttatgtttgatgagtttgctagagtggcttatagaactcagagaagcagtgtatttacatatatcagcttattatgaaggatattatgggtgtgaggttatggagatagctcagtcagcaaagtgtttatctcacaaccgtgaaaacctgatccatgtaaacatgcttggcatggtggcgtatgcctgtaatatttttgttttgttttgttttttgttttttttgagacagggtctctctatgtaacagttctagctgtactggaaccagctatgtagatcaggccggccttgaattcacagagatctgcctgcctctgcctcttgagtgctgggattaaaggtgtgtgccaacaccacccagctacctgtaattcttgtgctatagaaacagaaacgtgagggtcactggggttcactgaccagcaggtctagattggtgagttccaggtcacagaagaccctgtaaaaggaagagatgacaactcaaagttatacaggaacacacacacacacacacacacacacacacacacacacacgcacatgaacatatgtacacatacacaatgcacatatataatgcatacacacctacacaatgcacacatacacacacacatttttagaaaggatgtaaccaaggatatagaccaacaataaggagcaagggtgcataggcaagttctggaggggtcccagcacaggtagctctgcacacaactgtgttcaccagaatatacctttgcaattaggaggaggctgtatcatttaggtgtgagtgactgttaagtctatctccttgtcaccatggcttcatctctctggggtccagtgctcatccactaacagtcagctcattagaacaagtacccttcctacccaggataagccaggctaagaccatgctggccttgaactcacagagatctgcctgcctctgcatcttgaatgttgggattaaaggcatgtgccaccaccaccagacaaaatccaacagtcttaagtgttctggagctatgagatagtttagcagttaagagaacttacagagaatcagactggttcccagtaccagtggatgaactccaactgaggggattcgactccttcttctgacctgtctgggcacctacatacacagaagcacacatatacagaaataagaagaaaatataaaaaggaaaaaagttctgtgttacataatagcatatgcctggaatcctatcacttgagagatggaagcaggggaggatcactcatgagtccaaagacagcgtggtctacattgttccatgtcagccatgactacataataagaccttgtctcaaattaaataaataaataaataaataaataaataaataaaagaattcttcgtcaagaatggggccaaggccaatatcagtggctcctgactttcactggtatggctgacaatttttttggctctatggtggcataaaaacaacaccttgtgggctggagagatggctcagaggttaagagcactggctattcttccagaggtcccgagttcaattcccagcaaccacatggtggctcacaaccatccgttatgagatctgatgccctcttctggtatgcagttatacatgaaagcagaatgttgtatacataataaatgaataaaatcttaaaaaaaaaaaaaacacaacaccttgtttaccagaaaccacactcagagtggtgtggtggtatatttgctatcccagaacttgggagacttgggcaggagtatattgagttcaaggccagactgagatacatagcaaaaccctgactcaaaaaaactaccaaagagggcctgaagagatggctcagtggttaagaatagctgttgcaagccaggtgttgatgaaacagacctgtaatcccagtacttggcaagcagaggtagaggcagaagcaggcagatctctgcaagttctatgccagcctggtctacagagtgagttccaggacagccagggctacacagaaaaacttggaaataaaaaaaaagaaagaaagaaaagaaaagaatactgttgctcttgcaaaggacctgggttcaattcccagtgactacatggtggttcacaaaccttctatggttcacaaggtgtacatttatacaacatgaaataaatctaacctcttccccccaattttttttttgtaactatgaaaggaggaaaaaggaagcaaaggaagtagagatggataaaaaggaggaagagggagggaggaagggaaggagggagagagagataatgctttgaatttagaggttttgcggagctggggaccctgggtacaatcctgtgttatagttctgttcgtggaagggagctgcagctcccagccagtcatgtgatcaagggctaaacaactcacaccctgtgcattgaggctgagctaagatgttctgcagtttatgtgtattgatgcttttttggctttgttttgtttgtttgttttgttttttgagacagggttttctctgtgtagccctggttggctgtcctggaactcagagattccagctccctttgcctcccaagcgctaggattaaaggtgtgggtcaccactgccacccagctccctcccccttttttttaaacagggtcttactgtgcatcagtaggtgatctgaaaatggctgtgaagaccagggtgaccaggaactcacacagcctgcctgtcagccttgagtgttattatagctggaattaaaggcctgtgaccacggactggcttgttgtttaagaggagggtctcactaggtagctcaggctttcctcagactctagatccttctgcttctgcttcagcctcccaagtgctcagattactgtttgctgtgggtgtgggtgtgggtcagaagataaactgggagagtctgttttctttgtccatgctaagggttccagaggtcaaattcagttcagcagtcttgagaaaattgcttttccctgctgagtcaccctcccatgctggagcctggttttgacagtctcaggtagcagaggcctggcttcaaatttggtatataccagaggatgactagtaaccctctctttttaagggcctatttctacagttgcttttttgaagctatttttagactttttatttattttattattttgggttgtatgaatgtgaagcagtactttctcatcgggtccctctgctcacaaataacaacatggagacattattatttatgaaaacttgtccttagctcaggcttgttctcaactgcctctcataacttaaattaacccattaatattaatctgcatcctgccttgtggcattatctccttgctgcccagcctggtttccttcaagtctggctggtgattctacctccttcttcccagagttctctctctgtcaaaaagtccagcctatgcctgcctagctattggccattcagctttttattataccaagcacagcaatatatcttcaaatagtgtacaaatatgccacaacatgaatgttttgcctttatgtaatgtgtgttcaccatcacatgaattcctgatgcccaaggagataagaaggcattggatcccctgggactggggttacatatggttgtgaactgccttttgggtgctgggaatcgaactctagtacttttcaagagcaacaaatgcttttaactactgagtcatctctccagatctgtcccatcatcttcgagcctcctgctcctacttcccaagtgttaggattatagacatgagccatggtacctgaggccagtattgagattattaaatgaacttttggtttgtttgttttttgagaaagggtttctctgtgtaaccctgccagtcctagaactcactctgtagaccaggctggcctacaacttggagatccacctgcctcttcatacccattagaattaaaagtatgcccaccactgcctggtttaaatggacttttgattttatgttttcaacctatgatggatttttctggtggaacctcatcccaaatagaggagcaaatgtatatctatatgtatatctcttatttaataatctaattacataggatagactatgaactattctgcagtttctgaatctatagaaagaacttaggtttgcagagcatctatggtcccaagactccactggaagtaaatggtttcctgtgttctttgtttaatgaataattttttttgaaacagggtttctttgtgtagctttggctgtcctagaactcactctgtagaccatgctggccccaactcacagagatctgcctgcctctgccttcctagtgctgggattacaggtgtgcatcaatacagactcgatatgtccttattttgtcattgatcaggaaaaaaaagaaaaaagatggtgtgttaaacaaaacataatgttaacttttttgttgtttgtttgttttttgcctagtaagatatcacacctcaaacaccagatactgaggagactgagacaagaagattgtttgaacctaggagtttgagaccaccctgagcaacataaagaaaacctgtctattatactaaaaaaagacataactgagaattggtggcacatgactagtccagcactcaagaagcagaggttggatgatcagaaactcaaggccaagttgagctacatactatttcaaaacaaaaacaaaaaacttactgtgttcaagaaaaaaaattgttaaagcattcttgctatgtttttcaggtaagtctggaacacctgggtttaggggacccttccacctcaatctctgggattataggtgcattatctatctatctatctatcatataacttttataaatatatttattcatatataatatatacttagcacaaaagactgtataataaaatatatgagtacctgcttacataaatatttgttatataatgtttatattacattttttacttattattatctcttgtatgtggacatgtgtggacatgatcagaggaaaacttgtggcagtcacttctctcctttcactacataagttccagggattggattcaggtcggggctgactgcaagtgcccttgtccactgaaccatttcagcagccctagcaattctcttaataacctcatgaagtaggcaatattattatccataatttcaataacagaatcacgttgagagtgaagttactactcagcatcattgttttcgaggatgaccttgcactcctgaccctcctacctccacccgccaagtcctgggattacaggcatgtgccatcacacctggccaccattggttttctataccaagttgaactctaaaatcccatcaatgacactccactgtagtcatctggaattgtagggagccgtccctgcattctccattacaatgatggtgcctgcaggcactaaatgtaaattaatggtaattttccatttccttgatctctgcctattccgtggctcatatggcctgaggagctgaagccaatcatagggtgacacgtcccaggcggggctgccagcctttattaggggacgggattcttggctcggggtctccgctctggtaagcttatgctctcctctcaagatgcattaaagctttcctgcagaaggatccgagtgtcctgtgtggttattgctggcgagaccatagctcgggacatggaataccctttgttactgggacaaaaggataatcatcatcgaaagatgatgtccatgcctgttgcctataaattaaagtgttagatttacctatctctggaacgtctgtctctgtctctgtctctgtctctgatttctacatcaaaggcatggagttgagttctgtgttaaacagaagatcgacagcaggctgggaataaagttcagtagtagaaagcttgcccagcatgaatgaggactgaagttcaagcctcacctactgaactttgaaccccagccagctgtgagctttggactgagctgtgtgccttattcctgtatacagggcactctgtgtgcctggaggaaggggaggctgcacatctgccattgaaatggctggctggaatgaacagcaatatacatggagggaagttgataagaaagacagggcatctttccaaatacccttcttcctattcgtttgtcctcctctctagcttggtttccttcttcctcatattcttgagaaggcaagaaagagtagaggaaactgaaaggaaatttctgttcaagcacaaaagaaataaaacatgtgatgatttgtttttgttttgtttttgttttttcctgagacatggtttccctttgtagctttggaggctgtcctggaactagctcttgtagaccaggctggtctcgaactcacagagatccacctgcctctgcctcccgagtgctgggattaaaggcaagctccaccaccaccggcaacatgtgatgatttttttttaagattttatttatttattatgtatacagtcttctgcttgcgtgccagcagagggcaccagatctcattcaaggtggttgtgagccaccatgtggttgctgggaattgaactcaggacctctggaagaacagtcagtgctcttaaccgctgagccatctctccagccctcaacatgtgatgatttaagtcaacatttttatccttctgaacagccattagtctatcatcttctagaaataaaactgaaaactcagttttcctcaggacttttcattctagagaatacattttcattggatcagcacactgtaagcctaccagagctctgtcataatttttactttcacataacaaaaatattcccatgcccaccttaatgactcagccttgaactcaagtcaggtctgaggagaggagataaaagtgcaaaaagtctcctccagaggaaaacacctcagtcatcaaccacagtagcttccatctagatacaactcttgactattggttggttgctagccaaggatggctgatggcaaatggtcctctgatgagtgccaggccccagagtatcagggacaccacagcaggtggaaagtatttttgtctagaatctcatctcctcatcccagtccctgacaaaagtgaccccataattaggtggtgtgggatgaagaaaggaagacctgataggtaggtcgacatgtggttccctgcacagagcaggggcttgagcatcaaagcagagtacagatgctcttccaggtagttagagaaattaaacccacagcaattagatcctcagacagccatattgtaactgcagggaggagacaggaaggagctttgaaagaaagggagggacgagagagagagaaagaacacaacttgaatgtctaggtctgttttcttgggcaaagtactgcatcttgacattctttcctaggaatacaacggtatcccattgtcttctttcataattttctgagtttcatttttgtctcttcctgcagttccactctcttataagctggcccatatcaatattctctctctctctctctctctctctctctctctctctctctctcactgtctccccctctgtgtagtgtgtgtgtgtgtgtgtgtgtgtgtgtgtgacttcagtgcacttgagacagagacttgccgtgtagccctggctggcctggaattctgtaatcatcctgcctctgtttcctaagtgctggaattataggtgtttacaaccatgataaaatagaaattgtcttttattacttcaactgaaaatcgcagcacttgggaggcagaatcaggaagatctctgtgagttccaggccagccaggtctacagagcaagttccagtatagccaggactacacagagaaaccctgtcctgaaaaaccaaaaccaaccaaacaaaaatagccagctgtggtgatttatgcctttaatcccagcactcaggaggcaaaaaacagatggtctctaagttggaggctacacagagaaaccctgtcttgaaaaaaataaaaaacagctgttttcttttttttaattgggcatggcggtacacacttttagttcaggagacagagacaggcggatctctgtgagttcgaggccatcctagcctgcatagtaagttccagacaagttatagagaaactatatagagaagactccatctcaaacaaacaaaaaggtttttttttttttttttaaattaggcatggtttggaagctaggacagaaattttgtgagctttaggccaacatggattatatttagtgagttcaaagccaccttgagccatatattgagacactgtcttttttgttcttgttgttttgtggggttttgtttttatttttatttttatttttttgaggacagggtttctctgtgtagctctggctgttctggaacttgctctgtagactaggctggcctcaaactctgcctgcttctgccacctaagcagtgcagcaccactgcccagctggagatttcttttattaaaaataaaaatggggaggtgggctggagaggtggctcagcagtaaagagcactagatgcttttccagaggacccaggttcaactcccagcaaccacatggcagttctcaactgtaactccagttccaggggacaacacccacacacagacatacatgcagacaaaatagcaatgcatgtaaaataagaataaataaatcattaaaaagtatttctaaaaattttgaaaactaggccaggtgatacctaggacaacttcctgctttgtgatgcgccatttctagtattgatcccaccatgctactcatgctaaaactggccttttgttgttgccaagcaatgaggcaattgaaaaaattattgcctgaagcaggcaaggagtgcatgaagattatttctaaagcaattctgcccacaaaggaaagatgaagatttttccattggattctgtgcatattcatacagggaagtactttggaggtaggcacgttcttgacatgattaaagtgacatttttgtttttttaatactttatttttgtcttatgtacatcggtgttttgcctgcacgtgtgtttgtatgagggcatcagatcccctgaaacagagttacagacagttgtgagctgccacgtgggtgctgggaattaaacctgggtcctcttgaagagcagccagtgctctttaccactgagccaactctccagccctaatgtgacgtttaaaaaggaaaaatgggaggcacactttagggcatacttagctcaaactcattatttttcttttcaccatggcaaaattcctggcagaaacaacttacgggaagtttatttctgctcatggtttcagagggtctagtatatcatgtcacagaaggcatgttggcagcagacaggtgtgtccaaagcagtgagaggactccagtgactataagtttgtctttttaaggtgcttccaaaagtcctggggttgtataaagaaggaatacaactgctgggcaaggtcaaagacacaaaagtgaaattagttgggcaatgcctgagtcatccttggtatgcagtaatctgagggccccgagtcttagttccattctctattgtgataaaataccccgaaaaagcatcttcaggccaggaggtggtgcacacctttaatcccagcactcaagaggcagagacaggtagatctccatgaattccaggccagcctggtctacagaacaagttccaggacaaccagagctacacaaactctgtcttaaaaaaacaaacaaacaacaaaaaagcaacttcagagagaaaaggtttcttcagagagaaaagctcatagttcaagacgaagtccatcatggtggggcaatcaagctctaccaggagcaatgagggatgaatgcaagcaagtgcttttcttcactgtatatagcacaggatctgctgcccagagaatggtcctatgtgcaattacagtgactctttccacatcaatgaacacagtcaagataatcacccacagctaggcccaggggcccttttccaagatgattctagatcctgttgagttgacagttaacactaaccatcatgctacaaatcttgaaaatgcataggttgccccatgccactttcgttgttgttaagacagggtctcgtgtattccaggctgacctcaaactcactaagtaatcaaggatgaccttaaactcctgattctcctgcctctacctctagagtggtgttagacctacaggctgcactgcactactgcacacagttttgtgtagtgctagaacagaaggcagtactttgtgatactaggcaagcactctaccaactgaaccatatccctaggtcctcagttactcttatcttgatgtcgtggaggaggattagacattttagatgactacttcttttgtgtatctggtatgtttatgtttatgtatgtgtgtgaagtgtgtgtgtcagtgttcatacacctgtgtgtgcaaatgcatctggtatcctatgaatttctcaatcactctctgccctgcttttattatttgtttgtttgtttgtttgtttgtctggaggcagagtttctcattgaacctggagctcattgattcaactagacaagccctagggttcttcctgtctcttcctgcttggttctgagaataaaggtaagctaacataccttgctgcttttttttttttttttggttgtttgtttttcaagacaggtttctctgtgtagctttggaagttgtcctggaactcactttgtagaccagaatggcctcggacttatagagatccacctgcctctgcctcccaagggctgggattaaaagcgagcaccaccaacacctgactcacaccttgcttttaatgtggatgctggtgatcaaaggtcctcatgactgtgcagcaagcactttcccaacaaagtcacctccccagcccacctgaacacttcttttacaactattttcttgttgttgttgtttttgagacaggctggcttcaaacacatagagctctatctgccactgccttcttagtgctgggatgaaatatatgtgccactgtactggactacattttatttatttatttcctttgatacagggcgtctctaattatgcagctctgactgtcccggacctcattatgtagacaaagttggccctgaactgacaaagatccatctgcctctgccatgagagggctgggattaaagatatgtaccactaggccagactattttttaatttaaaaaactgtttatacaatatattttgatcatattctctccctcaactcttcccagatcatcccccagttcctacccattcagctttatgttctttctccctcttaaaaaagcaaaacataaaatacaaaacacaaaacaaaaacacgagccaagctggctagtggaggcagactggcagtttgcttatctttgtatgcacagagtggtccaattcagtggtttcactgcacactccagctccaggaacgtctgactcctctggtcacgaagggcacctgcactcatgtgcacacactgccacacagatgcaggcacatgtacataatttaaaacaataaaaatagctggatggtggcacatggcacatctttaatcccagcactcaggaggcagaggcaggtggatctctgtgagttggaggccagcctggtctacaaatggagttctaggacagtcagggctgttatacagagaaaccctgtctcaaatcccctcccccaacacacatacacacacacacacacacacacacacacacacacaaaaagaacccaaacaaaacccaataaaaataaatctagatgacagagatatatttatctcccctacccactgtgctgaagacaggcttgaaagcaccaactgttttgtgttccattttcagtgttgagagaaaaaaaagtcacaaactctaattacctgtatgtagatgggactttctttgaatcaccagttcccaaatactaacacggagatttattattaatactaaaagcttagctttagtttagccttgttcccaactagctcctaaaacttaaattaacccatttatattaatgtatgttttgccacgtggccagttatctctccttagtacagtacatcttaattcttccagggctcactggccctggaatctctgcctctcagattcttcccctgagttcctcgctctcttggaagtcccacctatcctctcctgcctagctattggtcattccgctcttcattaagccaaccagaaggtgccttaggcaggtgaggaaggacagagacatatttacacagtgtgatcaaatatcctacacccatactgataaatcctaccagtgtgtgttgttccaagccatacacaaacataatctgtacactcaaaagagttgaacgtttgtataaaatacttcaggttctgaataaagagaaaaacatgaggctactaaggaaatgctaaaataaaaaaaaataggtgttatttccaactttagtcccacccagatgttcaatgtgggacaccttacacttctggagatcatagttacagggttcaggttctggttcatttgctctctggctgtaacactgaactcaggttgtcaggcttggcagcaggtaccttcacctgtcaacccatttcaccggcttccattttttgttgtttctggttttgttttgctttgcttctgttatgtggcggtcagaactcagggttttcaggttatgggaaagcactgcgccactaagtcatatctcaagcccttttcatcgtatttatttagagacctggtccacagtgttatgtaccccaggctagcctccaatttaccatgtagccaaggatggccttgaatttataatcctctgccttcacctccagagttatggagatgcagacctttaccagtttgtctgttttggttactttaggacagactctcctagcctgatggtagtgatgtacacttttaatcccagcacttaggaggcagaggctggtggatctctgtgagttagaggccagcctggtctacagagcaagttccaggacagccagaactgttacacagagaaaccctttcttgaaataccaaaaaatagatagatagatagatagatagatagatagatagatagacagaagacagactctctttatatagccagcctggcttggaaccttgacctttgatgtggcatgcccctctgaatatattttattacaatgggttaataaagaagctgatttggccaatagataggctgaatatagctaggtgggaaatccaaatagagatacaagagaaggaaggtggagctaggaagatgccatccaactgcccaaggaacaacatttcagagccccaccagtaagctctgggttaatttaaatataagagctagatagtaataagcctgagccattggctaaacatttataattaatattaagccttagagtggtcatttgtgaactggcgggcaggagagaaacttccagctgcagtccttcctgcctcagcctccaaagtgctgggattacagaaatgtgtcactaaatccaactaccccagggtctcagaagtattcccaaggtgggtgaagtaattacattcccatgcctcaaagacctctaaagtctctgcatcatgtaagaaataacaaatgggtgtcttttctatcaaatactgtaaattgtaatgagtgttcctctgtaccaccagccagctcccagataagcacatggagacttattaattatgaaagctcggcctgtagcttaggcttgtcccactagctcttataacttaaattaacctatttctattaatctatctcttgctttgtggccttttacttctcttatgtcttgcacctcctgcttcctctctgtgtcctctagcatctgtcccactcctagattcatctcttcttctctctctgccctgaagtcccgcctaacctcttcctgcctagctactggccactcagctctttattaaaccaattagaaggcacttggcaaagacataccttcacaatgtacaaaaggattattccacaacaataaatcttgtggttagggcaaggagttaaaatgctttttacctccctcaccttgtaagacttttatacattttgttgttgttgttttgtttgtttgtttgtttgttttgagacagggtttctctgtagcttttggagcctgtcctggaactagctctgtagagcagactggcctcaaattcacagagatccacctacctctgtctcctgagtgctgggattaaaggcatacaccaccactttgtggcagaaaatcttattttttatacaaaccaagctggccagtgagactagcgctatcagcaagcttgattgagaccctgcctcactgaatagggtgctaagaatggaggattgatttctaacatcaaccttgggccttcgtatgcaggcacatccatgtgtgtctttttctgttgctgtgacaagacaccatgaccttggtagtggacttgctgacagtttcagagggtgggtcgctgatcatcatggcatgaagcaagacagcaagcaggcaggtatggcactgagtagtagttgagagtgagactggacctggcatgagcttttgaaacctcaaagcccccaacaagaccacatctcttaatccttcccaaaacagttccacccactagagaccaagcattcaaatgtatgagcccattcttatccaaaccacaacaggccacaaacacccatttgtccacattcatgcacacacatacacatataaaatacacatgtactatatacatacttaggtacatacatattgttggttgccaggcattgggtacatacttataatcatagttactttggatgcttaatgcttaagacaaaagggtggaaaatttaaggccagcttgggaaacaaaaacagtattttgtttttgtttttgttttttcaagacagggtttccaaaaacagtacttcttaaggaagaaaagccaagcatggtggttcatgtttgtaatccaagctctcaggaagctgaggtcagaggaatgccaggagctcaaggccaacctgccctacagtataagtccctctaaaaactaaacaaaaagagggaaatttagctcagttggtagagaggttgcctagcatacacaaggccctacatctgatcctcagcaccttataaagtgggttcggctgtgtttgtctgtgatcacagcaatagaaacacaaagaaaggaggatcagaagttcaagattagccatggctacatagggaatttgagtctaaactggggtagagaacagggaattggggaagaaaaaggaagtgtaaaagaagaaaaggcagaaggaaaatgaaagctttaaaataaaggggagtgtgggttataattcagtgaaagtgttttctatgcaagacaacttaggtttgaacagtagcactggaaaaaaaatattgtaaggctgagggaatagctccctggaaaagaacttgcttagcataagactagcaagagaaaggtgatggcacacacctgtaattccagcactctagaggaggcaggcagatctctgcaagttcgaggccagcctgacttacaaaatgagttccaggacagccagagctacacagatacacagagaaaccctgtcttggggggaaaaaaaagtttgagtttgagccccctgcactatcagcaattatgaactttcttctgagtgagtgggcctttgctcatttccacagagacgatgtcctgtgatgtggatctgatactaatcctggaatgtcaatgcgcaggatgcccttacagaatgaacctgcaccagggcccagtatgccctaacaaggactgaagccatcaagatcccagccccactcagtatgagcctagagagagatcctcaaaggattccagattcttgagtggactcctgggtcatccaaagcattgtgaggcacaagacagaaccagaacaacagacttgaaaaaaaaggaagctgccacagtcctgcccattcacaatgtgtttatctctgaggggacaggactaattagacagatgggactgcctttcccaaggtggtattaggggttggctgcagtgctgatttgggatggtggtacatcatttcaatctggaaaacaaataaaatcttcttgtaggcagaactgcagatgggccaacacagttccctggaggtgtgaggcctgaagtctgaagggaccagcaggtaactgggcaccacagcctcagacaagtcattctcagcaagagcatcctgcttcctccaagggtttctttgcctgaggaaagtggaagctggcactcacattccttcaggatcttcagaaaatggaggcaagggtgatcctgaagccctatccgctttgtctggtgaccagtgccagtccaaactatactgacaagcccaaaatgaccactctcttttctgtggttcaggatttcactccttaatggagacagagcctgggctccaagagaagcaagcaatgacattaattattgggcctattttctgaagcacaaggacagtgtaactgtgacagcagatcttggagacctaaaagggggtgatgttgaatggaaagtgacttgccagtcttggtagaacatacctttcactcttgcactgtggaggcagaagcaggaggatctctttgtatgaggccagtctgatctaaataatatagtgagttccaggccagccaagactacatattgaaactctgtcccaaacaaaaaacaaaaaaacgggggaaaagtgacttgaggttccatcaggagtcaggatggagaggaggctagggagtaaggaagaaggaagaaacagataatggaatctgagaactccccccatgtgtgggtgacctatgccaggtacttggccaagtgcttggatgtgggaaagtctgctgctgctatggctttctaccctgaatccatcttgaagcaagatgaaatagggttctctgcctccctcaaggtgtccaatcatgtgtgcccaatgatagtttgtgagagatttgaaaaaatgtgcaggagtataaactgttatcagagctgtaagagtcagaacctgagccttggcagccttaactaactagttgggtcactcatcctcaacaggtcaattaaaaagacaaaagttgaagtgaaaaaaagaaatattataattggaaagcacaatgacgtctggtggcattctctactccaagtccatttccagggttctgttaagtggtatagtttaagcttacatagaagacaaaaggcatacacaactaagcagtcctttgtcaaggtgtggtcgtttcatttccagtttctctggtaaggtagtctgacaagttttcggaactgtgaaatatccttcctggagtcaagttcctctgttggctggcatctgtgacagagtcttttccttctccttgaataagacccccagggaaattgcaatctctggagagtccagtgttttaatagtctgattgcaaacgggcatccatcagggtttttagaatatctttaatcaagccaggatggttagaggtttaagattggaagagattcctacccgcggcgaggcagctcattcttgcttccgcatgccagaggatgagctggctgaggtcggaaatgccccgccagaaggctgggttcctttggccacagcttgaccacagctaaaccaccattggtaaaagggaagccgaagttctccgacaacaccaattctccttgcagccctgaagtcccacccctctgatctaggcggcgtctccgtggcgacgtgctgcgatgtgcggctgcgcaggagtcagggagccaggggatcaggnnnnnnnnnnnnnnnnnnnnnnnnnnnnnnnnnnnnnnnnnnnnnnnnnnnnnnnnnnnnnnnnnnnnnnnnnnnnnnnnnnnnnnnnnnnnnnnnnnnnnnnnnnnnnnnnnnnnnnnnnnnnnnnnnnnnnnnnnnnnnnnnnnnnnnnnnnnnnnnnnnnnnnnnnnnnnnnnnnnnnnnnnnnnnnnnnnnnnnnnnnnnnnnnnnnnnnnnnnnnnnnnnnnnnnnnnnnnnnnnnnnnnnnnnnnnnnnnnnnnnnnnnnnnnnnnnnnnnnnnnnnnnnnnnnnnnnnnnnnnnnnnnnnnnnnnnnnnnnnnnnnnnnnnnnnnnnnnnnnnnnnnnnnnnnnnnnnnnnnnnnnnnnnnnnnnnnnnnnnnngaaatgtgaagagccaaaaggaaactccaaaatgacgccttccgctgaaagtctgcagctagggatagagctggaggagaagccaggacctcctggtcccgcgggaaactgagttcaaggggagtctgggaaggagaccgaagtcaggcttccagtggcacaccgtgaatgtggcccgattgtctcttagcaaggaaacaatctcctaaactggaggctggtccttttagacacctagaagaaacaccaggtgtcatctctactgccccctttggagaggagggcccgtcggactcgggattccgacgctggttactcttttcaccccgttggtatttgatttttcgaattctaaaactgcccgcagcgcaagtcgcgcggtgtcagatgagcggccactgactacatccctagaagatccgggatcccactctggctcattgaataccctttatgctctacggggagcacaagcggagagggagaaggggactgggtagaaatgcagcccaggtgggttcggtaatctgggcctcatttccttccctgccaaggacaccgagtatatagggtttctaagtcctccactttcctcagtggtctagtaaacctttcatcctgtttacccattttccaagtaggcatcactgcgagaaccttatttcagtgcgagacgaattaagatgtactttctgggttgtgagtcttccgttacatttttgattgtgtaaatcctgagggacgaactcttggttgttgttctctaatacagtgggatttcttgtcatcgagggaagtggccaaacatctgatttctgatgttgatttccacagtttggctgggatcactcgctgcacaagcggaaaagactacccccagtgaaaagatccttggtgtactacctgaagaaccgggaggtcaggctgcagagtgaaaccaactactctcgggtgttacatggttacgcagcacaacaacttcccagtctcctgaaggagagagaatttcaccttgggacccttaataaagtgtttgcttctcagtggttgaatcataggcaagtggtgtgtggcacaaaatgcaatacggtaagtggcaggaagacgctctctctcttaggtctgacatgcatggcttcacctgctctagagcctttcttatctgtgcatcgcccaaatttgtttacattttcttttgtgtaagcagatttggaatttattaagagattttcagtagaagcgttaggacagagaggtgctcaaggaaagaacaaacccagttgtgggtctggggctcttcaggaagaagtgcccccatcagtttctttactctccattccttctagttaatggccttgtcccctctttttctgctctttttctcacttctgcatcttttgatggtgtcaaatgaacgcatgtctttagtccctggctctgtatatgcttctgcttctggtgttttagcctcatcttttaagcaagagacctcaaagcaaggacagaaattgatgctcagaatcgccattcaggatacatgatagtggcaacttaattgctgtgtgtcagccattgacatatgtagaagtgtttggaatttggctgaaagtaaaaataaggcaaataactttttttccgtgtaatagaatccaaacatagcacttggatggctagggagtagaattgcttaagttccaggcaggactgtatactgagaacctgtctcagaagaaacaaaaaggaaaaatgagtagtttcctataagaaagacaagccgggtggtggtgaacacctttaatcccaccgcttgagaggcagaggcggatctcagtgagttgaaagccaacttggtctacaaatcaagttccaggacagccaagactgtcctgttacatagaaaaaccctgtctcaaaaaaaaaaaaaaaaaaagaagaagaagaaaaagaaagaaaagaaaaagaagaactggctgtggtggggcacacctttaatcttagcacttgggaagcagagacaaaagtggatctctttgagttcaaagctagcctgatctatagagttccaggacagccacggcttcatgaagaaacccagacccagtcttgaaaaacaagatagaaaagaaaaaggaaaaaaaaaaaaaaagataagaaatgggtacctggtggtgtattttagggtatgagcgtttgtgaagaagaggacatgagagtagggaacagttttaaagagagtaacagttataaataattggaagggaaatgttatcagtaagctatatagccaatatggttacaggcaggaataaaaatcaaaagggtggatgtggtgcttgtttaacaattgtgtatactaaaattgggatgctgcagagaaggttagcatgtcccctggacaaggttttcacactaatctctggtgtttggggtgattgggatagaaggatacaagtggcaaaacattacagaaatggtagatgctagaagagacaggacccctccctccatttttaactcaccttgtgtgagtagacagggaatgttatatggtgactctggaccaaaacatacttggggttacttaaaagaaacattactctacatcaagaaaatcttgggccagtgacattgtttaatagaaagagcttgccacccaagcctggcaacctgaatttgattcccagaacccacataaagggtggaagaagagaactgattccttaaagttggtttttctgactgccacatgcctgccatggcacactttctgagagacacaccacactcagcaacacaaacactaataataaattttaaagagagagaaaaaaaaaaagttgggtgctcagtgggcaaaagctaccaagcctgccaaactgagtttgaccctcaaaacccatgtgatgaggctggagagatgtctcaggggttaagaacactgactgctcttccagaagatctggattcaattcccagcacctacatggcagttcacacctgtctgtcactccaatttcaggggaccaacacccatggcaaaaacaccaatgcacataaaaataggaacctgtgttatggaaagagaacaaactaccataggctgaattgcacatgcttgctgtggcatgagaacccactgccaaatataaataatttttttaaaaaagacaaaaactatttaagtaccttaagtgtctttataaagaccataggcaaaactttaattttgaggaaggaaataatactatggtggttggaaccaaattttcacttctgttaatggctgtttattttacacacaacactttcaaaactatgttctggtagcaaggctgcacaaaacttcctttttttgattacagttgtgtcccagtgatttaggaaactgccattgttgacacttctttgacctagtcacaatattttgaaggtaagcacacataggtttgattcccatccccacatgtggctttgtaactctagatccaggagacctgatgtccttttctggccaatgagggcaccaagcacatgtgtgttgtttagacatacttgcagacaaaacgcccatacataagttttgttttgttttaaatttactcttaatatctacttctgttttcctaatttaaaaatctattttagccaggcagtgatggctcaggcctttaatcccagctctcaggaggcatagcaggcagatctctgtgagttccaggacagccagaattacacaaagaaaccctgtctcttaaaaaaccaaaaccaggggctggagagatggctccgaggttgagagcactgactgctgtttcagaggtccccagttcaattcccagcaaccacatggtggctcacaactataatgaaatctggtgccctcttccggcctgcaggtatacatgcaggcagaacatgtaaaaacaaaaacaaaaacaaaaacaaaaaaacttaaaaaaaataacttactttcatttttaaaaatttcatgtgagagccgggcatttgtggcatatgcctttaatcccagcacttgggaggcagagacaggaggatctctgtgagtttgaggccagcctggtctacagagtgagttccagcacagcctccaaaacaatacagagaaaccctgtttttggggggaaatttttatgtgtgttagtgggtctacattttccacaatgagcatgtggaggtcagttcataggtcatggttctcttctaccacatgggctccagggatggaactcaggtcctcagcctactgagctcagtactaacttcatctgtcctttgctggttctcttgacttcatctatttgtccttgctgtcctggaactcagtgtagaccaggctacccttgacctcacagacatctgtctgcttctgcctccccaatcctgggatcacagttctgggcccctaacttagacataatacctatttctgtcttcccatatcttcatgacttaaaatgcttgggaatagtgtaggctgtcttcttttgttgttgtgttttgagacagggtctcatgtaggccaggttggcatcttctattttactatatagccaaggatgtctttgaaaatcccaatcctgtctgataattgctgggatgatagacaggtactaccacacttggctgtcttctttatttttttcccctttttatgtgtatgggtactttgcctgtatgtatgtatatatgtgtgccttgtgtgcagagtgtccgaggaggccagaagtgggtattggattccctgaaactgtagttacagatgtttgttagccatctcgtgggtgctgggaatcaaaccctgggtcctgtggaagagcagccagtgctccagaaccagctggtttttctttttgttgttgttggtattttttttggggggggtggaggacagggtttctctgtagcactgggtgtcctgaaactttgtagaccaggctggcctcgaactcagagagatctgcctgtctctgcctcctgaatgctggcattaaagatgtataccaccatgtcaggctctcttttctttttataggttatttttctctctactcagcttctagaaccaaagcagggcaccaagaacagtttttcccccttggctttgtgacattgacaaatacttctatttcctttggtgtttagttctgttgggggtagggtgggttgcaacctggtcttaggtagccaaatcctgccttgagctcctgaacttcttgcctctacctcccagctgcccttggctttgtttttgtaaatagtaatagcattgtctggtctgctagtcctctggaaacaggctggctgagaccctagcacttgaggctgaggcacatgggtctcctgaggagttcattatctgatgtgccagttcaaggttgcaaactatctgggaggctgaggcaggtggatctcttgagttccaggccagccagagctacatagtgaaaccctgtttcaaagaaaataaaaagaaaactatgatctgtgagggagattttgattccagaatgaccaggcttcaggtgtctaaagagagttggaatgtgctagactggaagcctgaccatctaagattttactttacagggtttgtgagacatggggacgaaataattagggtactgctccagggagagaaaagtccaggaggaattgctatggattttactannnnnnnnnngaaaaaatccagatgatggagggagacggtaaagagagaagtgtaagacattaacctgagataatgttgtgcttttatcaatcagttgatatttgggagaaggtaagtctgtattgggagttactaatttacaagattattgaaatttctatattatatggaataaaagacacctttggcttcagtcccataacccttacttaaaatttcaaaatttattttgtatgtgtattttctgggcaagatgttcttcgtttttctgtgaatttttttcaaagatgagcactattgagacaaaatggttaaaaatctttgatctttaaaagaggaattacatgcctacccttggagggaaaacctgtatttacaaggccagaactaatacagagcagactgggagcctggtggaaaacagagtacagacaacagtcaggtgttgcaatagaagggtctgacgtgcagtagaggtgttttgtttatttagaaaggcttttgttgttgggctttttgtttggagttttgtttgtgataggacctcatatggtctaggatggccttgaactactcctggtgttagggttggcccctggctctagctctcaagtactgcaattattggcacaaatcaccccatgtgaagctagttagtttttgagatggggtttcctttccaatgtagcccctgctgcactgtagatgaggttgtaaactaactctaagtagttttccctgcccctgctttctgagtaagacaccatgcctggcagagagatttaagttacagcggaattcatttctcataatgccctctagccaaaaactaccagggagccatgtagtggaacaagtgagataacatcttttggtctaggtagagataacctctgtgtgggagggagggggcctcccctctaagagggtatcagacagaacttggaaaggatttgtgccaggtgcttttggggggaaatcttaaggaaataactctgctctggatgggatactgttgtgaagtgaaaggtgagttcctcctaaatcctttctagaatgaaggtaaagctatagctggtaatgatgaagcagccgctcttatccatcaggttaaggacatgtttaatctgctgtggctctgacagtagtcacgcttgatctttatttgagatgagtagagaacggcctgttctgatgctgatgaacaccaaagccagatatcaggctagctctcaggctgctttttctttctctatgtctcctaaagtcatggtcatagatacgttgctgaggtcacagatggactttgtagtcatgaagtatagaatttaattgctgcagctggttgtcgaatagaagggagaggttttaggcaacccagttttggaggtaggatggttaagcatcagcactgagaaagtggctgtaatattaatgatttctgagattatctgctcagagtaaccaaaatcataaaggcataacatggcagtcactgtgacacatgaaacaaatagctcacttagttttccctggccagatattattcagttcccctgatacatacttttttccttttatgagtgagtgtgtgtgtgtgtgtgtgtgtgtgtgtgtgtgtgtgtgtaagtacactcacacatggcatgcatatgttatatctttgagactggatttcattgtgtagccatgggtagcttggaacttgggtagatgaggctggtcttgaactcagaaatctgcctgtctctgcctcttgagtgctgagattgaaggcatgtgcaatagtgggatacagtcttttagaggagggtttattggtcagatgtggctgtgctggcttataatctcaattacttcagagactgactaactgagggaagaagagcaaaagtttttgatcagcagggctagagatggctcagtggttaagaacacctgcctgcttttgtgaaaagttgagggctatatcgcctgccttcctatcagcgggaagcactggacttgattcccagcactttttttttttttttttaactttttgtttgtttgtttttgttttatgagacagtttctctgtagctttggagcctgtcctggaactcgctctgtagatcaggctggcctccgcctcctgagcacttaaaactatatatggtgttgcacatttataatcccagtattaggtagagagagataggaacatctggaatttaaggcagtccttggatacatagcaaatctgaggacaatttagatgacgtaagaccctatcattaaaaataaattaaaaatagggcctggagagatggctcaggggttaagaacactgactgctctcccagagaatctggattaaattcccaacacccacatggcagctcacacctgtctgtaactccaagatctgacacccacagagatacatgcaggtaaaccaccaatgcacataaaataaaaataaattattaagaaattaataagcactcgagaggttgaggcaggagaatctctgtgagttcgaggccagcctggtctccagagagagtgccaggataggctccaatgctacacagagaaaccctgtctcaaaaaaccaaaaaatagaaaataattagtagaattcctaggggtagccttatcctctctgaggaatagatggaaggtggtggggggtagtgggagaagagaaggaactgtgattgaaataaaaaattaatgaaaacaaaacaaaaagaaaataataataataaaaataaggccaggcgatggtggcacacgcttttaatcctagcatttgggaggcagaggcaggtggatctctgtgagtttgaggccagcctgcctgccgaatgagtttcaggacagccaatgctacacagagaaaccctgtcttgaaaaaggaaacaacaacaacaacaacaaaaaaaaaacaaataaaagataaaagttcaatgttagcctgagctatagaatgagtttaagcaagcccaggccagttagtgagaccctgtctcaagataaaatgtaagggcaattgaggtcactaaggggtaaaatacatattgtgcaagtggaaacaaggtagaagatgagctaacttattaatgttgtgcagccatggcatgtgtgtgccattaccctcacactctctcacacacacacaccatactaaacgggagctggagctatagctgggtagtagaatgcaaagcctgaggttcagtctcccagtattagagagggggtccaggtgcagattgagcaattaagtgcaagaccactcagaggggctctggaggggcaggggggttatggtaatagctcaagagataaagtgcttgcctagtgcagtgccctggtttagacccttaatatccacccacccaccccccaaaaaaggtggcacatctgtaatcccagctatttaggaggtgaggaaagaggttctccaagagaaagcctgagtgatgtagactacatatctccaaacatttaaacaataattgtattggacttcgccaccaggcatatgtatctttattctccccctcccccctcccacaggctaacaggtcttctatcagatgaacatannnnnnnnnnctatcagatgaacatattttatagttagtggagaaaccaaattatcctcctcctctccctctacgattacagaattagtgctttccttatttttaggactaattttggttttgttttggtgacagggtagtggagtctcagtaagtggtcttggatagccttgaacttgatatataaaacaggctagcttagaactcacagagtattcctacttctgcctccctagggttgggattaaagatgtggctaccacttccagccagacaatttgatattggttgttttgtttttgttttttgagacagggtttccctgtgtaaccttgtctgtcctggaattcacagagatccacctgcctctgcttcccaagtgctggaattagcaggcagtttgatttttattgggaggatatttaggtatagggttgccaggttgctaagttatttctcttggtgtgtgtgaatgtttctagttggaaatgtttctgtgtccctattttatattcactaagtttctgtgcaaacttgatccatgtgtaaggctttaggaagatcaggagttaatgagtttatgccccttatgtgcaatgatagtagacttgtttgttactgccttttgtcttttggaaagcatctcttggatgagatttgggcatgtttagtgtagccctttgctctttttaggctatccttgttatgtaaggaaactaatgatattcctatattccccagcttgtgctgggcatgtaccttagaaatgctctgcctagcatgacgagggcctggtttcatccccagcactgcagaaaataaggtaggatctgagcatggggagtaggaggaagggcagctttcctcctttaggatattgatggtttctttgttctccaggagatgatagaccttggctctgctctgtggggccacaaatcacgttctttctctacatctccagttataatccttagatgcatgtaaacccatagatacactaccatgcatttacaaacactggtacttccagttgataaatgacatttgtataatttgatctgatctgagccctttatttcaggagtagttcatttgcggtttcagctgctgggtactgaacagagaaggaagatgttgccccttttgctgctcatagccttaatccaagctgtatctttggtatgcattatagtcagtactggaattacaggggtgtgccaccgagccgctggacatttttctgttaaatcccagtatggttgatgagaggttgcgatggggtgctgctcagtggccaaacatggacttactatgcctaataccagcaaggaaaatgaaaagagtgggtgggagcttagacaaataagagtttgtcctgatccgggcattggtggcgcatgcctttaatcccagcactcgggaggcagagacgggcggatctctgtgagttggagaccagcctggtctccagagagagtgccaggacaggctccaaagctacacagagaaaccctgtctcgaaaaaaaaagagtttgtcctggtgacatccataagtattacttcccttcctgagcctgaagcacaggactgctttttcctgttcttgagaaacacaatctggattgtcaggtttctttacattaaaccatacttctcagaccttttactgaaatacccctagactgacagtactgggccagtatgaaatagccttggagttctaagataatcttaaaaatatcataagtgttggtgcctttattcagtgctcagggagtcagaggcaggccactctctgtgttcaaggccagcctagtccacagagctcgttccaggacagccagggatacacagtgaaaccctgtctcgtatatttttctttattaaatacatatatatttaataaagaaaaattgtattaatttaaaattaattgtattgtattaatataaaaataccttgtttgtgggaatgtgtctcaggaaagttcatgaggctcagggtttggtcctcaacacacatacacacaccctgaatactgtatggagtgtggaaacgtctgtctactcatcaaatgagtactcccagatgaggtactggtttcttgcagaaaccaaagcaccacatacatatacatggtacatttatattataagaaatttggacacagcataaatgttgaagaacagggaatttattcattaaatgctagcttatgtggtgaagtactctatagccatgaaaaactagaaagctgggaatagtggcatgcacctattatttctggcacttgggaggtagaatcaggagttcaagatcatctgctgaatggcaatggaggctaagaggctacatgagaccttgttctaaaaaagagacaaacagtaagtggtgtgaccagcatctgttggtacaggcttataatcccagcactcaggagctagagggagacagctgtctatgagttcgagaccagcctagtttacatactgagctctggatagccagggctatttggtgagactttttttcaagacagggtttttctgtgtagccctggtcctgggaatgaactcagcactgggcagggtgttaaagaactcacagagatccacctgcctctgcctcccaagtgctgggattannnnnnnnnnnnnnnnnnnnnnnnnnnnnnnnnnnnnnnnnnnnnnnnnnnnnnnnnnnnnnnnnnnnnnnnnnnnnnnnnnnnnnnnnnnnnnnnnnnnnnnnnnnnnnnnnnnnnnnnnnnnnnnnnnnnnnnnnnnnnnnnnnnnnnnnnnnnnnnnnnnnnnnnnnnnnnnnnnnnnnnnnnnnnnnnnnnnnnnnnnnnnnnnnnnnnnnnnnnnnnnnnnnnnnnnnnnnnnnnnnnnnnnnnnnnnnnnnnnnnnnnnnnnnnnnnnnnnnnnnnnnnnnnnnnnnnnnnnnnnnnnnnnnnnnnnnnnnnnnnnnnnnnnnnnnnnnnnnnnnnnnnnnnnnnnnnnnnnnnnnnnnnnnnnnnnnnnnnnnnnnnnnnnnnnnnnnnnnnnnnnnnnnnnnnnnnnnnnnnnnnnnnnnnnnnnnnnnnnnnnnnnnnnnnnnnnnnnnnnnnnnnnnnnnnnnnnnnnnnnnnnnnnnnnnnnnnnnnnnnnnnnnnnnnnnnnnnnnnnnnnnnnnnnnnnnnnnnnnnnnnnnnnnnnnnnnnnnnnnnnnnnnnnnnnnnnnnnnnnnnnnnnnnnnnnnnnnnnnnngtttgtgtgtgtgtgcaccctgtgtacccagtgctcttggagattagaagacggcatcagatctcctggaacttgagttgtgattttttttgagccatctagtgggtgctgggaattgaacccacgtcccctgcatgagcaacaagtgctcttaacttttaagtcacctttccagctcctgtagttttaaaaatatatgcttctttatttcctattgtcacaaatctgtttagtgtactacatatcattgtagtaaatgtttgtattttttcttcagcctcgtgatatcctttgtggggcggctgatgaagttctggctgtcctgaagaatgaaaagcttcgagataaggagagaagaagggagattgacttgctgcttggtcagacagatgataccagataccatgtgctagtgaatctgggcaagaagatcacagactatggtggagacaaggagatccagaataaaggtcattgtgacctttgtgtcctcatcatattttgtaatggttttcggctttcttagtgagcactcagcatcattattaaaataatagcattgtttccataacctatcctatgttggttgaagagaatagccaatataccaaatctgttggtacaggcttataatcccagcactcaggagctagagggagacagctgtctatgagttcgagaccagcctagtttacatactgagctctggatagccagggctatttggtgagactttttttcaagacagggtttttctgtgtagccctggtcctgggaatgaactcagcactgggcagggtgttaaagaactcacagagatccacctgcctctgcctcccaagtgctgggattaaaggattaaaggcatggaccactaccacctggctgaggctctgtcttcaaaataaaaaaatagacaaaacaaaatcaaacttactgggctatacagtaagttcaagactagctctggacagtgtaattgtctgaggacactccacctctccccaaaatgtgtagaaataccatgaagccctggttcagatctgagcagacatacacaaatgaactgtggtgtgccagcatgatggttcagcaggtaaaggcatttggcatcaagtttgaactgagtttaacacctgggactcactgaaagaaggaaagagctaactcatgcaggatgtcatgtgaccgccataggtatacataccatgttacttgtgtgtatatgcccaaacgcgcacactcgaaacatgagcacaaataaatatgtgatccattactgagaggtattatctaggttaggttaattgaggtggaaagacctaacttaattgtgagcagcaccactccatggggtagaacagaataaaaagaaggtgagcactagcatcgtctctgcctcctgaccatgggtgtaaggtgaccagctgccacaagttctggctgccatgactttgccatcaccaaaagacaggaccttgatcagggagccagagagcccctcccttcagctgctcttgttgggggtttcttgctgcagtgagacaggtgactcacagcatgttttccttcttggcacactgactgtgttgtttcttggccttagctttgttctttgttgtttttgtttgatacaaagactgaattctgtcttcctacctgataatttatcttttttttttttaatgtcagtatcaagatttctgtatttatttacattggtgggtgtggagttctgaggaaaacatttgtgagaattgattctccttccaccttgtgggcattgggatcagacttggtgtctgacttggcagtaggagccttcacccactgagccatcttgctgacccagtgtagtgtctgggaaactggtacacatttgctcttctttctatattggattccattctagaaatggaaccctgtgtttctagtaacttttgaaaaccattgtcctgtgggtgtgtttatgtgtcttcacaccccccacctgcatacattgcttattaatcttacgtctttctcaataacaatctttgcctgctcttccccctgtcctagtagggaaaactcggggagccagagcctgaaacttctctccatgtgctgccagttcctggcactggtcgcagtaggttagtgtggactcgccccactctgggtatgtaagagggatttgcattgaagcttctgcccgtgtcattgtggaaagcaattctgtgccaggtcacccacatacctgggcttccctgtgaagaggcagggtggtgaggcgaagatgtagataagattttgattttctgaattccaagttacctcagttttgtttttgtttttttttttttttgacacaggattgatttactgggattgttttgtgaaaatcttaatacatagttaagagtgaataaatattttttatgagttttttgctgtttcttttattttttatatatttgaattacaaacaagattgaattacatggtgatcccagttcccttctccctcccttcctcctctaccacgcccccaactaaaatcctacctatcctatgacctttcttctaatctacacctgactcaacctttctgctccctcatgacctctgcatccttccttttcttcccttctcactctcgtagcttcctcccccctcttcccatgctctcaatttgctcaggggatggtgaccctttccccttctccaggggacaaagtttgtcacttttagggtcttccttgattactagtatctctggcagtgtggattgtaggctggtaatcccttactctatgtctaaaatccacatatgagtgagtacataccatgtttatctttttgtgactgggttacctcgctcagaatggtttcttcgagttccatccattttcctgcaaatttcaagattccattgtttttttctgctgagtagtactccattgtgtaaatgtaccacattttctctatccattcttcggttgaggggcatctaggctgcttccagtttctggctattacaaataatgctgctatgaacatggttgaacagatgtccttgttgtatgagacctcagtttttcatgggtttttaagcctttcttaataccctgtaaaagtaataaaataattgtatactattttaaaatttcttttacttagttgtgtgtgtgtgtttataaatgtgtgcatgttaatgaagaggcctatataggccagaggaattatttcccctagagctggagctataggtgtttgtgagccactttacatggtggtgggaaccaaactcgggtcctttgcaagagcagtgcctgttgttaaccactgggacccctctagccccttgttctttgtttctgtgacaggctctcaatgtagcccaggctgtcttcagaattctgttcctcctgcttctgctttgcaaagtgctaggattctaagtttgtgtcaagtgtttgtagtgccaataagaaagactgaggggccagcaagaaggctgggtgggtaaaggtgtgtgtttctcagggtgaagacagacctgtgaagacagacctgttcaatccgcccagaatggatggttggttgtttgctttgggcttttgcggggaggttggttcnnnnnnnnnnnnnnnnnnnnnnnnnnnnnnnnnnnnnntgggaacctgctctgtagatcaggctggcctacagagatcaacttgcctctgcatcatgaatgctggaattaaagatgtggaccagtagcactgggctgaaccccccagagtaggagagaattaatcccatgttaagcttgaacaaaatttaattctttttctttctttcttccttccttccttccttccttccttccttccttccttccttccttccttccttcctttctttttaagtctacagcacctggtattactaaggtggtctcccatccaagtactaaccagtcctaccctgcttagtttatgagatcagagcagattgggcaaattcatagtggtttgaccacagacagaatctgtttctaatctgttggaataaaatgttaagctttaatcttaagtcattttaagttacttcatgttcctttgactaatggccttagccatgccattaataattccaagagtcctgctgggtttggcagtgcacacctttaatctcagcagaggtgaatccatgtgagcctcagggccagattggtctcagtgagttccaggccactaagggctacactgtgaaaccttttccccaaaataaatgaatgctagacatagtggtatatgtacttgggaagcagaggaagacagatctctgttaattggaggccaacctgttccaggctcaccaaagtgagaccttgtttcaaaacagaaaacaacaatgaaaattcccagggtctgctatatagtagactaattaaacgttccacagataattgaacaaatgggtgtttgtactcattgttgaccacattaagtagcaacaatgttttgtgttgtctttctcttgcagctctttgtagtggatgtccagacaggccagatcaccaagattcccattctgaaagaccgcgaacctggaggtgtgtctcagcagggttgtggtatccatgcaatagagctgaatccttctagaacactcctagccactggaggagacaacccaaacagcctcgccatctatcggctgcctacattagatcctgtgtgtgtgggtgatgtaagtttttccattggtctttgtgagaactaaccttgttttaaaacatggatgctctcctaacctagaaaggggtggttttctctagatttcttctcacatgagggtgaggagtagaagagagagcagagtggagattgggatgccataggtaagaaccagagacttgtgtttgatagaagggacagatggcacatctctgtggctaatagtgggctgtttttcagttcacagggtccatgtatctcctattgccctgtcagaaaataaacttatcaattcatctatagtcaggcattgtttttggctccaggagcatggcaatgaataaaattaataagcccttgcctttaatatagtgctgagtgtgacctatgagccaattatgtgtatcatacaagtcagtagcatgtcagtgtgacgtacaccatagaggagtagcaagcaggctaaaggggatggagagtaaagggaaagatgctgtttcagggggagtcaggaagcttcatttagaagacatgtgagcaaggagacttaaaggaaacatgggcatcgctatgggaatgaactttcctttctgggcagaagagaaggtagaaatctggaagctgtgtcctctggtcattttgttgtcgttgttgctttgaggtttttatttgtttgtttttgggttttgttttttttttgcgacaggatttctatgtagtcctggctatcctggagctccttttgtataccaggctggcctctaactcactggaatcctcctgccactacttccccagtgttagcattaaaagtgtgtacccctttttggaattcttattgtctgcaggagtgccagttttattctacctttgattctcccagatgtattagatcttaccctacaggttaagatcatcagagaccacgcttttgtatgcttgttgttattttacatttacttgtatgtgtgtatgggtacatatgttggtgtacatgtagagtcagaggacactgaaaaattatgcagtactctccttcctttgtgtgggttttttggggatcaaacttaggtcatcagacttggcagccagcccctttacttgctgagcttaggtcatcagacttggcagcccctttatttgctgagctattttgctggccctgttttgttttgtggcagagtgtccatatgtagctcatgctgtcctggaatttgggatcctctgtctgaacctcctaaattgtaagcatgtgtaaccatttaacctttcatacttaatttttttacaagatgttttcagtcagacctctatgcttttcagaaatcattatgatccttattttactaatctttttttgttgtttttgtgttttcctctctgtacatgtcacttacccctctaaggatggacacaaggactggatcttttccattgcatggatcaacgatactatggcagtgtctggtaaggttgctctcctttcagaagatttggtgtggcaaagaggaagtttaaaaattacagtagtgtgtctgggtggtggtgtcgcacacctttaatcccagcactggggaggcagaagcaggaggatctctgtgagttcgaggccagcctgatctatagagtgagttccaggacaggctgcaaagctacaaagaggaaaccctgtctcgaaaacaaaaaaaaacaaacaaaaactatagtagtgtgatagaaaataactgaccaactctatcaggggccagggtgccttatcttttcttacttgtatttattcatttgttcaggtggtactaggttgaaattaaggccttgggtatactgattgagtacccttaccactcagctatatttctcagactcccctacaacaccccctcaccaccacttttttttgagggatatggagtctctggtatagaagtcgtatgtgaactagacatgtcttgagcttgcagcagtccctcgcctaagcctcttctctggtgatactataggtataacctactataaccagattaagggattttgtgttttcctcaatcattccaccttaattttttaaattaattaattgagattaattaattgtgtgggtgggtactctcacaccttggcaactctgaggacaactctcaggtgttagttctctccttcttcccaacactttagaggtgaaatcaggaagttcgggagttcatgggccagcttgtgctatgctgaaatcctgtctcaaaaaattaaaacatgggggggtgctggagagatggctcagaggttaagagcaccgactgctcttccagaggnnnnnnnnnnnnnnnnnnnnnnnnnnnnnnnnnnnnnnnnnnnnnnnnnnnnnnnnnnnnnnnnnnnnnnnaaagcagggaataaaaagtttgttacaaaaaaaaaaaaagaaataaaaaaaatctttaaaaaaaaaaaaaaaaaacataggaagagagggctagagagatggctcagtggttaagagcacagactactcttccagaagacctgagttcagttcacaaccatctgtaatgggatccagtaccctcttctggcctccaggcatacatgtagatagaggactcttatataaaatacataaaatgaaataaatcttaaaaaaacaggaagagataggagagtgggtgaacagaaacctaagtaaataagtatgggtttcaatgttatgaattgtttctaatgttctgttttgtcatagatgacatcattttattttgttgaacaatcagggataagttcaaagaaaagttttctttgggtgtgtgaggcccagtgctgaagtcagcactgggcaggggaataaagagaagaaaacatcttgttcattattgtttgctaaggagaaaaattaatgggttttgggttttatttggcatatggcatttaaaatcaaatttaggaggcaagcatgatggggtacaccttgaatcccagcactcctggtgcagaggcagacagatcacatgtttaaagctagcttattctatacagagaggcccacgaggaggagggggtcatagtgagacccttcctttatttaaaataaataatatacataaataagtatagatagacagatgaacagacctcaaggtccttgtgctcaggcaactgttttacttctgagttacattcccagcacaaaaaacagccatctcggggctggagagatgggtcagcaaattaaaaacactgactgtcttccagaggtcctgagttcaattcccagcagctacatagcagctcacaccaatctgtaacttctgacaccctcacacagacattcatgctggtaaaacaccaatgatcataaaatttaaaaacaaaacaaaacaaaaaaacgacaaaagaattgagccatcttttttccttttcttctttttttaaatacctgagatggtctcctacagtcagtccatgcttacctcatactcactgtgtagattaaggatgaccttgaacacctgatccaactgtctccacctcctgagggcttagatcataggtatatgccctcatacctatcagggtttctatattctggggattgagtccaggacttccatgcatgctagacaagtgttctctcaagttatatctccagcactaagaattcattcttggccagatgtggtggtgcacacctttaattccagcactcagggaggcagaggcaggcagatctctttaaattgggtcatggacctccctaaaattgaatataaaaagatgtttctaaaaaaaaaaaaaaaaaaaaaaaaaattttttaaaaaaaaaaaaaaaaaaaaaaaagatgtttctagagaaagaagtctagatgaagaaatctgaactgagtactgagtatgatggcccagggttgtaaccctggcactcaaggagctgaggaaagagtaaagctacaagtttgaggccagcctaggctacagagtgagatctgtcttaacgtataccagccaggtgatgatggtagcacacacttttaatctgagcatttgggaggcagaggcagaggcaggtgtatctctgtgagatcgaggccatcctggtctacaaagtgagttccaggacagccagggctacacagagaaaccttgtcttgaaaaacaaaaagcaaaaaaagaaagcatactaatatatgtggtggaccatggagcccagcttcagtgccaggcagtgtgttgaaaagtaaagcctgtgtaatcttctgtggcgttttctcatagagggttaagaatatttgacacctgtgaatctcctacgctgcaggctcacgggatggttctatgggactctgggaggtgacagatgatgtattgaccaaaagtgatgcaaggcataatgtgtcaccagtccccgtgtacgctcatatcactcacaaggccttaaaggatatccccaaggaagatacaaacccagacaactgcaaggtgcgggcgttagccttcaacaacaaaaacaaggtatggctttatttcgggggatcctctctcctccaaggcactgccagctgtgtgatgtggctttaaactcacagggcaccctctttagaggccgtgaatgctggtgagaaattataatgggctgtgaagctcgggcttaggctctgctgtgtttgtttggatagaccatgtttgtggctggttcagtttccctgagagcactctaatctgacagtgcctcacttgcttgtgcctttttaggtgctctgctttggatttgattttcacgcctctaaaagccaatcacttgtttgtaagcccctcattttttcaccgcttcctttgtctcacacttgccactagtgtcgcttaaatcactgtgccaggtcttctgacagtgaggttgtaacaggacctaagactagacccagagcccagaaaggagacaggcttctgcaaaatctgaaaaaggtcccaatttgattcatttttaaaaatatttatgtgttgtgagtgttttgtctgcatatgtgcatgggtgtgtataccacatgcacaaggccctgatttgaaaggtggttccactagaagaaattcagaacaaggcaacccaatcacaaaaagacaaacatgatatgtactcactcatannnnnnnnnnnnnnggattaccagcctaccatccacactgccagagaagctagtaaacaaggaggaccctaaaagaggcaaacattgtcccctggagaaggggaaagggtcaagatcccctgagcaaattgagagcactggaagaggggggagggagctaggagaatgagaaggggagaagaggaaggatgcagaggtcatgagggagcagaaaggttgagtcaggtgaagaatagaagaaagggtatgggataggcagggttttagttggggggtggtaggggaggaagggagagagaagggaactgatattgtcatgtaaatcaatcttatttctaattcaaataaaaaaagatttaaaagaaagaaagaaagaaagaaagaaagaaagaaagaaagaaagaaagacaaaatcctctctgcacccacagctcccacattgggaatgagaaaaacagcctttcactttgaactctgctctgacagctttaaggatgtcggggtaatcagtgacatagaaaggacattttcccccacagatgtgtgttcatgtgattgttagaggctacacttgctttgtggaattgaatatactacctgctgcagtctgtggggtgaggtgaaagcatccttgataactgtgggttttttgtttttatttttttgaagcagggtttctctgtgtaacaactttgactgtcctggaactagctctgtagaccacactggccctgaactcaaagatcttcctgcctctgcctcccaagtgctgggattaaaggcgtgcgtcaccactgcctggcttcccctgtgtgttctggtgctttagtttgctgcacatcatattataacttctttttcattgctcttgtaggagttgggagccgtatcactggatggctactttcatctctggaaggctgaaaatacattgtctaaggtgtgaacatgacttcgtagttgtatatgataatttaccataggtttataatactatcattctcccagagtcctgttggatttgttcaaaacatcatttctcccaaggtctggaaatagaattgcatagtacatgaagctgtgggtctggcatgtttctcttgaggaaaaatctggctatcttttaaatttatttttgagacatgatctgtctatgtagcccggtctagtcttaaaattgtgatcttcccacttgtaaaatacctctcaaagactggaaatactgaatgctaccaacatgcttaagcaagaaaaggcctttgtttattatgtctcaagacagggtttctctatgtagccctctctggctatcctggaactcactctgtagaccaggctggcctggaactcagagatctgcctgcttctgcctcccaagtactggaattaaaggcttgtgacatcacaacccagcatctaaatatgtttgtttgttttgtttttctttcttaaaaggttagctcactaggtagccctggcttgtctaggacttgggatcttctctcagcctcagtgatagagtcacaggaaagtcttttaaaaagagctgagattgcaataacacaatttaggagaaaacagatttatcaataatatctgctagcagcttttttatacaataaagtgtatatgtgggtcatgagttcatgtcttgtctgcgctacttataatatctgtgacaagcgttttctaaagagaaagcaaagctctgggagtggatagttccattgggtcatagcaggtttgcactccactggccctacatagcgtcttacatacagcaggcggacactgtttgctacttcacagggtcaaagatgcaggctgactcagattaactaggatagagtcagtcctggggggtacactgtctctagtgtacagttctcttttctttgggaaattggctgagggtggttagaaattagtccctttatctgaagagaacaaggagtagtggtcatgtcgcagaatgaacaaggtgagacttaggctttagtgccctgggcttgttcctggagataactatagttcttgcctttcctggcattctaattatttaattccagccttctgtttttcctaatccagaacttacttcatttactttgtcttgtcactagcttaggtaggtaattcatgtgcaaaggaagcccacagaggtaggagcacaagaatgcccattttatgctggttatgaatgtatctctttgcagctcttttccaccaaattgccatattgtcgagagaatgtatgtctggcttatggtagtgaatggtcagtgtatgcagtgggctctcaagcgcatgtctcattcttggatccacggcagccatcgtccaacgtcaagtctgtctgctccagggagagaggcagtggtaagtccctgtgtgttccttcaggcttactgctacattgcaaatgggttttcaccttttgtttcttctttgacttccaaataagaacagtatgtagcatgtagaagtatttggtgacagacgagagaaacttaattacatacatgaggcaacagaatgtccaggctgtagaaacctctggtagaaccactgtgaggagataagcagttagttagcactactcccctgggatctttttgttgggtccctgcctgagctaaaattcttatatactgaacagcactaggggaggaattagaagagtatgaggtcacttttggatgtgatgataaatatgtagtgtaagggacagctacacctcaagaagatgaagaaagtacttgttttagttctgatcagtggttgtaaggtctcagtacctaacactggattgttgctgggaaccaaacccagggctctgtgcttgcttgaactgctctgcttctgagctacaccaatagaccccagcttctattcatatagcatattctaagagccatcactcactttctttagtggaagagacttgtgctggcactacattaagggttcagaatactgttttcaaagaactctttccttcccaccaagaattctgtggaaagcagattagattaagactactttctgtccttccagggaacctgagttcaggttccagcactcacatgaaatggctcacaccttcctgtaacttcaacaccaagggatctgtcaccctcttctggcttccatggccaacagcactcctatgcacatacttttacacacacacacacacacacacacacactttttaaaaacttaaaagccaaagaggtacacacctttttttttcccttaatgtgcattgatttttttttttttctttgcctgcatgtgtgtctgtgtaagtcacagatcctctggaactggagttataaacagttttgagcaatcgtgtgggtgctgggaattgaacctggttccactgggagggtagccagtgctcttaaccactgagccatttctccagcccctggtgcacacctttaatcccagcatttaggaggcaaaaatcaagcaaaactccttgagcactaggccagcctggtctacagagtgagttccaggacagccagggctgcatagagaaactctgtcttgaaaaacaaataacaagcaaagatagtgttatttctgtgtagatattacaaaagcagcttttgtgtttttgtttttctgtttattgctggggaaggtgggtgccgtgatgctaattggaagtcacagaacagtttgagggagttggttctctccttccatggcagttcccaggaatcaaacttaggtggtcagccttgacagcaagcgtcctgactgctgagccatctcaccaaccctaggatttatttgtaagtagttaagatgtatatttagactagagaacagtggatataatgaaagctggagaaggagtaagatttcgctgggatggtgtgcaatgaaaggttttatttattgtcatcatcattgttataattgctttctttttgagacaaggtcttactaagcacccttggctagcctggagtttgctgtgtgtggactaggctggccttgaattcacaagagatctgtttccctcctcccctgtactggaattaaaggcatacaccaccatgcccagtttttaaagggttcagttactaataatggaggtagcttgcataaagaaatactggttcacagtaactacgcctttaatcccagcactcgggaggcagaggcaggcagatctctgtgagtttgaggccagcctggtctccacagctagtgccaagataggctccaaagctacacagagaaaccctgtctcgaaaaaccaaaaaaaaaaaaaaaatattggtttacaaaggtccctggctccacatagatgccaagagaaaccagtatcccatgtacttatgtaatccacaggtgcagcaaatgtattttccctttaatccaaagtagttggtaacttgacataaataacatagtaccaaatacttcctgtagggccatgctggtaatacaaagataatagtgagctgcaatgtaataacgtgtgatggagaataactaatagctatgaacaatgactccagtgctaatcaagcgtatgacacacagagaatttcagaaaacaacgtggatattcccagtaatctggctggttatcagagagtcctgttagtcaccataaattctgttgcgccattggcatagttctatctgataatctgggttgtactatccctatgactgctctgtgcttttctttttcagggatccgatcagtgagcttctatgaacacattatcactgtgggcacagggcagggctccctgctcttctatgatatccgagcacagagatttctggaagagagactctcagcttgttatgggtctaagcccaggctcacaggggagaatctgaaactaactactggcaagggctggctggtaagtaagctccaacctgaggttgcttaacagggaggggaaactgtcttccctctgcttacccctcctcactaactctcttgctgctgacattccttagagcagagaaaagcactctcctctcactttgcctttgtgtctgcatattggctgtgggggaaaagaggttggcagtggtgataaatgcttgtaatctcagtattctataaactgaaggaggattgtaacaccaaaatgaaagacacagtaaaatatgctggtgccttgagaatttttccaagtggcaacagcaggaagggaaaggaacttcctgttgttgctgccagtgagttgtcgttaacaagtttgattccgaaaagctgaaggtgaaaacttgctttcagtgaaataattctttatcctgtttagttgggaaaatgaggtcacttttcatgagaaccaataatcatgtgaaatcaggtggtaggcatggaaccctttcctcaggcagagaccggaaggcattcctccccttcctgctctttcctagtggcgctaacggtctccttctctcccatagaatcatgatgaaacctggaggaattacttttcggacattgatttcttccccaatgctgtttacacccactgctacgactcgtccggaacgaagctctttgtggcaggaggtcccctcccttctgggctccatggaaactatgctggactgtggagttaatgacaactaactttctcccaaaatgcagatttacactaacttccaccctcggtttccttgtttggtcttttgattcccccactgtggaagctttcctgtatagtgcagacagcagtttgccgtggctggggcagttactaggaggaagctatgcagaaatccaaaaggtggggcttttctttggttggttagtggtttgttgctttgggtttttcattggtttgtttggtagatgtttttgttgtttgtttgccctttcagtaatcagaattttacacacacacacacacacccgctttctcaaccagacattgttacaaatccccccccccccattttttttttttccttaagtgatatacatctcccttctctggcttctttacactgaaacgacaaggtcatcctcacccttccttcacttgagaggtagggccccttataattgtgtggtagctgtcagactttctgtgaaagtttgggagccttgtgcgtgtgcgtgtgaacttgtgtgcctgatggtactgtgtcactgatactactcagcgtgaggattatctgtattaaagtatttataaaagaaacaattttactcagaggctttgggactagcctgtatctttttaaaaggctgacattgtaggaagtgaaagcgtagagaaacaaatcccaccaggaaaaccttgagttagagtagcaggcttggagcaggagggtaggctccatgccaggattctaaagtgatccacccctgcctgtccttcctacctgtgtatccccaagtaagaatgcctgtgtatgtgttgtcccttcctacctgtgtatccccaagtaagaatgcctgtgtatgtgcgtgtgacttcctacctgtgtatccccacgtaagaatgtctgtgtgtgtgtgtgacttccacttcctaacctcttgtctgcttagcccaggtgcctctttggggactgcagaaggcttcctggtgtaggtaaagagtatcctcttccagtctccttctgcctctgctccgggtctcatctggcctagagcagggtgtctcaagctagacgtggctgccattcatagtctcctaggacttctaggaggaactattccattcttggggttctgctggtattttctaattgggttctgtctaggaaggtatgatttgtagcgagtactttatatgtgggatatgttttctcaatacagtggagcttagcattggaagtcaccctcctgctctgttggttcatacctggggtagcgacagggtggctgtgatagcgtcactgcatgtgacagcaaaggtgtgattcgtacttcgcttgttcatctcttgaactttgtttagtctgaggctttttaacttacaggcaactgagcatcgtgccagctgttccctttcacacatcatgtcgaaaggaacctttccctaccccaccttctctgaaacacgcagtgctattctagcagtgcccggtcctgagaaatggagtcatagtcctacatccagtttctcagttgctccccgttcttcccgttttctccttgtgtcaaaatagtgtcctcatcatggcaggggttgctggggagggaagcagcagcaagcccacttgatagtgtaagtacacagcatatgccacaggttttagaataatcatcccataatctagataaataggtgctatgaacaggaaattaagaaaaatgctggatgctatgaatcttttgtctcaatttttttctattattaaactacaagctgtagatttcttagttctcacagaacttgtcgttttaaaactgacttgtatatttacaaaacaaaaatcttgagtaggatgctttgtgccgtggccagaccgtctcctgtgatgcgtttgtttgagattttctgttttaaaaatgtagcatttgactttttgccaaggaaaaataaatactgtcctagtgcagtgctgtttgagtgaatatatatggcaaggaagctgcagggaagagaccccaaaggattggttgagggcatgctgggatttgtccaggttagaataccttcctagagtgacttgctcctgctcccaagctctggggcaatactggtgtctctggggtacagatgagggtggctgtgcccaggggaagtagtgtagtgcctgaaagaaacaaaacactgactagctctaggataagtcaggatcaatgatgggtcctatctgccccaagaatgatgggaagtggcttcatagtggcctttttttgtaattggagccatggatcttcaatgttctttataaggtaggacacagtggctatagtaaaagatggtcttcccaaagctgggggtgggggtgggggagaagactgctaagtcataccagcttcatgtagctaactgtgggagacccaggagcactagagcactgagcctaaaaagtaatgcctaatcctctgccacatggtgtttaactaactgctttcgagggggaaaaaagctacagttgatgttcacatttgcactataggctaattcagaccaaactcatgttgggacctcaatggtcaaagattgcaagatggaaaaggatatgaggattagttgaagcaagttgagaatattcctagaaaagaatgacatttggacagggcctggaaccagcctctcctaaaatgaattggagtacaagatcctgaacaacgttggtgtttgtataatattctattgtgtggaggaaatgaagaataaaacaaacatctgggttggatagatggctctatagttaagagcatttgttgctcttgcagaggacctaaatttggttcccatagtgtttcacaaccatctgtaactccagttccaggggatctgaaaccctcttctgacctctgaggacagcaggcattcacatgtcacatacacacatatatatgcaggtaaaacactcatgcacataaaaaaaacttaatttctttttaaaaattaccttttagaaatgatcactgatgggctggtgagattgcttagctattaagagcactggctgctctcagaggaccagggttaattcccagcacccacatgacagctcacaattgccttatcccctgtcccaggacaatctaatgtccttttctggcctctgctgtgtattgcatatacgtagtgtacagacatacatgcacaagcaggcaaaatacacataaaaataagtgttaaaaagatttacaaaaaaaaaatgatcactgggggactgaagagatggcttactggtttacaaaactggcggctcttccggaggacctgagttcaaatcccagcacccacatggcagctcacaactgtctgtaactttagttccaggggttccaacaccctcacacagacatacatgctggcaaaacaccaatgtacataaagattaataagtcttttgaaaagagcactgtttttatgagatggccttggcactgatctcactatctagccaagaatgaccttgaagtctgattttcctggctccttttttttttttttttttttttttttttttttttttttnnnnnnnnnnnnnnnnnnnnnnnnnnnnnnnnnnnnnnnnnnnnnnnnnnnnnnnnnnnnnnatgtccccctgcctctgcctcccgagtgctgggattaaaggcgtgtgccactaccacctggctctgactctgcttcttaagttctgggattaccatatgcaccatacccagctgtcacattactcttgaatttttaggatgtcgctgtaggattcagttctatggaacatgctcagagaaaggtaaacagtggacttccctgaccctctggcctccatggactcttgctcctacttccattttcctgtcagattttgttgccaagtacatagcccagaaggactttgtggacttcctggtgctccttcctgccagcaacccctcctgccatggaagaacctccttgttcatttcaagccacgtgctgcctgcctcattccagatgagatactggctcctcccaccatcccttggtcctttacagaagagcacagactgacttcgaagtaatcttcaatgctgggtttacaggagtgaatgaccgaccatgtctaaccagttaagagttttagagggtaataggactactattatctgagatgagcagtttactggctgcttatctagatctgtaactaacatcctagtactgtgggcaggaagaaaaccaactgtcagctactgccttctataaactccactcgtctctttttaaatctttttaaagatttatttattaattatgtatacagtattctgcttgcatgcatgcctgcaggccagaaaagggcaccagatttcattacagatggttgtgagccaccatgtggctgctgggaattgaactcaggacctctggaaaagcagtcagtcagtgctcttaaccgctgagccatgtctccagccctccccacacttaatgagtgacagcccagtcctctgactggaaataatgaagtggctgttctctgagtgttaagatttagctcctaagtgtcccccagtgttggtcctttgctgataggctattaacatgtggtagagtcttctaggaggtggaagaaaactaaattacagggctgtgtacttgaagatataggagcctatcttttttttttttctttctactctcaaatttcatatctcctgtttttctctgccacacaacctcagctatgatgctcagctttgccacaggcctaaaacagtggatccagctacctatggaataacttcaagaaaaaaaggatgcccaaaagcctcaaggaagaaaatgaaattaagttaaacaagccaggtttggtgtaactgtagtatttgagagatgggagcagaaggatcaggaattcaagggaagtctcagctacatagttcaaagccagcctaagctacaagataccttgtgtcccaacacaacaaataatgatgccagaaggctgaacatgggagcataccactaatctcaggataagcagtagatggatctcttgagttggaggccagccagcactacacagtgagactccatctaaaacaacaaaacaaaagctgtcaggcccataaatcctgtatctctagtattctgtgctgagggcatttgccaatagcatagatgactacaaaattattactgtaatgatcacacttagagttctatcatagattttttgtttgtttgttttgtttttgttttttttttttcgagacagggtttctctgtgtagctttggagcctgtcctggcactcgctctggagaccaggctggcctcgaactcacagagatccccctgcctctgcctcccaagtgctgggattaaaggtgttagccaccacagcccggcaataatagttttgtttttttgttaattttgctttttgagataaggtctcacatagcatggctagccttcaactaactcctcctgcctccaaaatccaagtactgagattgtgtgtgtgtgcctggcttgggccttttactttaaagatgtggagtgtattttaaggtagtaacagattcctgagaaaggaacccaccccgaggtgcaatctgccaacagtgagtatggattgagagagaaggggttgttctagctgtacagctggttagggcaaaagaatggatgacagctttttttcttgagtggtgcaggtgtgtgtgtgtgtgtgtgtgtgtgtgtgtgtgtgtgtgtgtgtgtgtgtgtggggggggccagaggctcatgtagttcaggctgaccttgaactcccagtttctctactgcctcagcctttccaggtgctaggattacagacatgtactacccttcttggcttcagagtctcttaactttttattgtgtgtgcatgtatctatatagtggtctgtaggtggatatcagaggacagcttgtgggagtctgttctgctccactgtgggttctgactacaggaaactgaccttggcttttgtagctagtgcttttacccactgagccatcttgagggccccagagtcttgttcttctctcatacattacatcccaactacagattcccctccctccactcctcccagttgagtgttttttttcttttttctttcttttttttccttttttatggttttgtgagacctggtttctctgtgtaatagtcctggctgtcctggagctagctctgtaaaccaggctggcctggaactcagagatcggcctgcctctacctgaatcttcttttttttttttttttttttttttttttttttttttttttgtttgtttgtttgtttgtttgtttatttatttggttttttgagacagggtttctcagtggctttggagcctatcctggaactcacttagtagaccaggctggcctcgaactcagagatctgcctgcctctgcctctgcctcccgagtgctgggacttaaggtgtgagccaatcttcttttcttaatggttgcggttaacactttagaagtggtagtggagagagaaagggggaggagtaggcgtgtttattcaaaccaccacaattggattcaaccctcagtacaaaaacaacaaaattgggtatggtagcacacacttacaatcccagcacttgggcactggggaaggtgaagcagaataatgacccgaagccagtctgggttacatgagaccctgcctaaaaaagagaaagatgctagaggatcactgactgtaagtttctaaactactcctctaattactgtggaatgttgtttacttttagtgagctagtgagggttgctcacataagcaatggtgaggggttggtagttagggtttttattaataccttctagcctatcaaaaatgtagaaaactttgtctccatcaacccatatgttttatttctggaaatgagcagatactcgaggtaggcaggcatgccagcacagatagttaaggttagttgtctagtacagacagcaacactgtacaggtcatgtctataaagaaggaagtgcttagaccagcagccaggtatggtggtgcacacctgtaaacccagcacggaggtcgaggcaggatgggtagttagttacctgtgagtagctatatagttcagagacagattgggtaacaggagatagcctcaaaaaattcgctgggtatggtaacatatacctgtaatcccagcactgaggaaacaggcaagaggatctcacaaatttgagattggtttggtcttcatggtgagtgctgagtcatatagcaataccttgtttcacagagtcacacaaacaaacaaacaaacaaacaaaaacaaaaacaaaaacaaaacgggctagggatatagcccaattgtaaagcactttttaaaaaaaagatatttatttagtatgtatactgtgttctgcctgcatgcatgtatgcctgcaggccagtacagagcacaaggtcttattataaatggttgtgatccaccatgtggttgcggggaattgagtttatgacctctggaagagcagtcaggttaagataacctcgagccatctttccaacccctgtaaagcacttttgtttagcatgcacaagggcctaggtttaatccccagcacaaacaaacaaaacagtaaacaattccccaaaataagtcaggactatggcacaaacttgtaatcctaccactggggaaactgaggcagggagctgtaagttgggttcaatccctagtacagcatactgggtgctacggtggtggcacctgcttgtatcgaaccacacaaaggcagaaggatcagaaattcaaggtccactcgggaggcagaggccagcctggtctacagatagagttccaggacagccagggttactacacagagaaaatctgtctggaaaaacaaaaaggtcaaggtcatctttgttgcatcaggccaccctgaagtgccactgagtacaataaaagcattatccttctctttgtccctcctacttccctctctgcactctctgtagaatcatacatatctgccgggcggggtggtgcaagcctttaatcccagcactcaggaggcagaggcaggtggatctctgtgagttccagaccagcctagtctacagagctagatccaggacagagaaaccctgtctcgaaaaacaacaaaaaacaaaagagtcatacatataacagaaatttaaaatatcacaaggtttgccaatagttggtctctgggcagcagagacacttttgccaacctctagttgggtgcagtggcacctgtagtgcctgtaatcccatttggaagacacaggaaaatagtcatacacttaaggtcagtgtagattacatagctagaggttcagaccaactagagctacatacaaagaccctgttaattgtatcacaaaaggaggaggacataggagaaggaaagaaaaatccgtgaaagagttttctgtgcttcaaatgtctccttgtgaggtcaaggaatctatcctattcccagtagggggagccagaacttaaccaaactcggaggcacctcctgaatcaacacctaatagagtgctgaaaacaaaacaaacaaaaaaacagctgccccagagatatgcattataaaactctttgtttcagggaaacagctgccccagagatatgcattataaaactctttgtttcagggtgcaccgactcaggtctccaaccctgaactacttccccaatcctgtaaaacccattcataggactgaggggaagggcaaggcaggcagctattgaggaagtttttgtactataatgaagttttcagggcagtaatcccccaaactaatcttccctgtgatttctgtatagattgagatacaaaggcatgtgtatgcacacagcttctcaaaagtgtgtatcatttaaagccacatgggaagcccggtatgatgacatgtgcttgtaatccaatcacataggaacctgaaacagggtcatcaagaatttgaagtcagcctgtgctatatgattagacactgtctgaaaacaaacatacaaaatgtgggccagcaagatggttcagagggtaaaaacctatcccagccagaacctatttagtaaaggctgtcctgtggcttccacacgtgcaccatgccaccacacacacacacacacacacacacacacacacacacacacaatgccagatgggtactagggatgtagcagctccaggatagtgtacttccctagtgccctgcattgtaaaatagcattaacaaaaattagaaagtaaagccagatgaatcttattgtataagaaataggctattaaccacttccaatgaatgggattctataggagttaggttggtagcattttggagaaatagcactgcatcagaaaggctgattcttctagtagttgggttttgggtgatggtcttctattgtttgatttggattcttttttttgtttgttggtgggttttttttgttttgttttttttgttttttggggttttttttgtaagtatgagtttgcaatttgcttatttaactatattattagggggagcattctgggcacacatgtggaggttagaggacaacctgtaggtgtcaggtcagtcccttccactgtgtagatcccagggaacaaactcaggtgcccccacccctttctaagaagggtctgtttggcctgaacttaaatgtgggccagcctggctttgaactcacagagttcctcctgcctctgctgggattaaaggcatgtgccattatgcccagctttgatttatcttttctgaaatagggttgtatttcaaactgtccttgaaggtgcaattctcctgcctcagtctcccaagtctctctgcctggctcttggcagctgtttgactgtaagcacttcattagatctctctgaacgaatgtgaccttctttgatcagggaatgaagttgcttccataaggcattcttcaggctttgaacaaactgagtcatttattgagattttagagtgggttttacagtcctggagaaatggcagttcttcattttaactcagccagaataactatgagcagcaaggaacagaaggattgattacagaaactttaacacacagcttcaagccctcaaggctcctgccaggcctttatccaacctctgacctggagcctcataattccttctggttgtagtctaccctgtataaccacagttaggtaagaggccagccactgaaggaaaatatgtggcttttccataggactcagggcacctgagcaacctggtgggagaaaatgaaaactgggttccctgaggagctgaggttccagtaggaacagtgcactatgaagcagatctgggactcacaggaggcatcagctaccactgtacagaacaaggcagaggcaatgtgtcagttttgcctttgggaaccactgggctaaagatccagttgagctccagcctgtttgtagatatgggtgctaatttgtatgttccttgtggtatctcttccctgtgcctccgtagccagttatggctaaggttgaaaggagtttacagtagggctcttctctagcaggcaggtgcaggcctgcggaaactggtttaacttgcttttgagagtcttgactccacctcagactccttaagcctcagggaagggaagtggaggggttctggttcaagacccgaaatagccaaagagatctatctgttcttaagaaatctgttgtgccaggtggtggtggtgcatgcctttaatcccagtactcagaggcagacacaagtggatttctgtgagttcaaggccagcctggtctacagagagcgttctgagacaggctccaaagctacagtgaaaccctgtcttgaaaaaagaaaaggaaaagaaagaaaaaaagaaatctgttgttaactaggaagtctctggagaagtgttttcaaagtcaggtctcaggtcatatctgtttctggttcccactgctattctttcttttctttttctttttctttttttttttgggggggaggggggcagtggggtggagtggggtttccagactgggtttagccctggctgtcctagaactatctctgttttgaccaggctggcttagaactccaaaacctgcctgcctctgcctcctgaattcagggattaaaggcatgagatactacctcccaactagattttgttttttgttgtttttccagacagggtttatctgtagctttggagcctgtcctggaactcacagagatctgcctgtctctgcctctctagtgctgggattaaaggcgtgcgccatcaacaccgggctttaaatttagattttttgaaggccgaaatgttattgggccatagagtaagcagtgtctctcaaaaagccactcttgtcaacctactgttttctttttgaaagctgctccctgtgtagcccttactagttcataactgacagcaattcttggcctcagcctctccagtgcctcaactacaggatctaccatcatgcttatcttagttctgattttgttacatgaaggcttggctccctaccctgcaaccttctaaagttttttctgttatcttatttcccagaagtttactgtgttacatacttcaaggccaaattaaggttgtaaacagcaatgattgaaattcagcaaatggtgggaggacaagcctggaaagccaccacttgggaggtaaaggagtcaggaccaggtgcaggagtaaggagggatagaaaaggatctgtggttatttatcttcattgtatatcccacctccctatcaagaggcccttcccatttgatctttgctccctctctgttgtcccctctgacccaatagtgatctagtctcttccctggaaaatggccctgaggtactggaccagatttataaccttctctttctcaaacataacatcagttatccatcagtgtttagatgcattctgattggtaggatgcatatggtcccagagatctgtcagctagactttggcaagttaccaacttctctgtgcttttgtttctcatatgtaaatatccccaggaaaagagggtgctgtaaggtcatctttggttctaagatggtaacaaggtgatttaactcttatggaattcaatcaggaagatttgggcatcatgttgcatgcctgtaatcccagaattctggatgcagaagctagaagatggcaacaaatccaagacctagctgatgaggtacatagtgagttcaaagctagccaggacttcccaataaggtactgtcaaaaaacaaaccaagccatgcattgtggcacataccagtaatccctgcacttgggagacaaagatatgagatcaggagtttttagttgcatatggttgaaaagcagcccgagttacatgagatcttgtttcaaaaacaaaaaataagcaactcaacaagaacacgggcctgagtagaaaactatgatggaacatttgggtttgggggaagaagtgtgcatttcaaagtatctcagtgttaagaactaatgtgtgtgtgtgggggggtgggatttagctcagtggtggtgagattgcttagcaagcctaaggcagttggcacagtcctcagctagggtgagtgggtggatgggggagaaatacaaaggaaaataaaccaggtgtggtagtacaaacctttccccccaacactctgaaggcagaggcaggcagatctctgttctgaatgtgagggaaacctagtctacgtaacagagttctgggacagccagggctatgtatagagagaccgtgtctcaaaacaaacaaaagttagtgggctgggtgttaggataaaatttgaagggggaccttgggtaggggactttggcggattccatggttggcaagggtgacccaggaggagggacaaactcgccaggcagacagagtttaagtgagaaattttattagattggggagggagggagaaggaaagagaaaagaggtaaagagacacagagagaggacagaagagaagagggagacaggaaaagtcctgtctgcccccgggaacagcggggagagaactggaaaaagaacagaaagagagcagagtcaaaaagagaggataagtgggcggaggtatttcttttaaaggggtcctttgcacctgcgtgcagattagtactcatggagccctgggctgaccagagtacttactgcctgagtgcattctgccaggtgacaggcaggcataatgcctgaatccttacactggggactatacctcagttgttagaatttacctggcagaaatcctgggttccttagaaaaccagacatagttgaggatgtctgtaatcccagcatttgggagatagaatcagggggatcagaaattccaggtctacggggtggtggtagcacaagcctttaatcccagcacttgggaggcagccgcagcaggatctctgtgagtttgaggccagcctggtctacagagcgagttccaggacaggctccaaaacttacagctacacagagaaaccctgtctcgaaaaaccaaaaagaaaataccaggctaggccttgctacatgagacaatgtctcagaaaaagagttggtagaggaaaggtaacaaataattctctttgtgctacaatgtatattcatttcagacatagtcgtttctaagaaactctctagctataaaaaatatgctttaaactatttttagtaaacttattataaattatgatatttgggggctgagatgtgcaatggcagaagtctgagacagtttggaggaatcctcttcctactacatgattccatggatggaactcaggtcttctgacttggcagtagtgcctttacctttttttttcccctttgttttctgagatagggtttttatgtagttctgtgccaaaactcactctgtagaccagaatggactcaaactcacaaagatccgcttgcctctaccaccctagtgctgggattaaaggtgtgtgccatcaccacctggttgcttttaccttcttgcctgaaccaccttctaggcctgaaactagcttttattttttatccagctgtgttagcatttctctctttctgttacacaattgtcaagaagcttcttttttttttttctattgatttctatgaatcatgcctctacctctctgtaattctactttctttatccattaaaactaagcaaagtaaaggaaagataaaggtatccctctcctggggtgccccattaataccagagataagtaaatccctgaacacaccatctggcttgcttctaaactaagtagccagaattgaccagcacctggcactgtcactctaaggaaaagaatcccacccagaaagttttggccccagagaagttttcccacactgaatgaggccaagactgacaattggttaactttgctctttggactgagtccactttggacacaatccacctggctgtctcctgagccacccaggtgtcatatacctgtgatttccgggaagaaatggtacttacagaggtagactacaaattttttttgggggggggcgggcggttcgagacagggtttctctgtggctttggaggctgttctggaactagctcatgtagaccaagctggtcttgaactcactgcctctgcctcctgagtgctgggactaaaggtgtgtgccaccaccgccaggctagacaacagtgttttaactggagctacagatgaccctaagattgcttacaataaacccctttgttacataaaataaaaagcagaagagagaagtgtcttggtcacatggcaagttagtagccaacctaataatagttaaaagaccctgggtcaagctcttggtttgtaccattagtgagaatagttccttcagccacagcagttgctatttcctgaaaggacattttccccttctgatgcctcttgctgactactttatacttttaaatgtaatgtgttgtgagaataaatctagctgtataataaaggggaaaaaaatctctccacatagccctggctgtcctggcactatgcggacaaggctggccttgaactcatagaggtctgcctgcctctgcgtcactagtgctaggattaaaggtgtgtgccatcgtgcctccaggtttatgggtgttttgcttgcatgtgtatctgtgagttgcttgggcattgaatcccttaaaactgaagttatagacagatgtgaactaccatatgggtgctgggaatcaacctggccccctggaagcacagccattgctcttaacttctggaccatctacctctccagcccttgaggtggagggtcatattctgtagttcaggctattctggaactcactagatagcccaggctttccttgagtgaacagccatcttcctcccttagtctcacctggtttcacaaaaaataaatgaataatacacacaaacatgtatgtgtataactcaaagacagtgattgattcattgtctccgtgtctcatttatttggcaaacagtttcttgtccaaggggctggcaaaatggcaggaatagcagctgcctctcctggnnnnnnnnnnnnnnnnnnnnnnnnnnnnnnnnnnnnnnnnnnnnnnnnnnnnnnnnnnnnnnnnnnnnnnnnnnnnnnnnnnnnnnnnnnnnnnnnnnnnnnnnnnnnnnnnnnnnnnnnaggtagatctctgtgagttccagaccaacctggtctacaagagctagttccaggacagcctccaaagccacagagaaacctgtctcgaaaaacaaaaacaaacaaaaaaaacaaaaaaaagaaaaacaaaacaaaaagaagccctgggtttgatcccaaagccacacaaaatcaactgtagcagtacacactcataatctcagcacttgagatgtagcagtagggagatcagaggttcaagttaatccttggttacatactgaagtttcaggatgggatacatgaaaccttatttcaaaaggtagtttatggttcacacatgaatttcagcattttcgaggccaaggctagaggattgctgacagttccacaccaggttggcctgcttagcaagaccctgtctctaaacaatacaaagctggacctggtggcacagactttttattccagaactaggcatcagaggcaggaggatttctgttaatttaacaccagcagggtcaccagtggtggcgtatgcctttaatccaagaactgggttgggggggtggagcaggtggatctctgcgtgttcaagtcaagcctagtctgcaaaactagttccagaacagctagggctgttacacaaagaaaccctgactacaaaaaaacaaaaacaaaaaaagagaccaggatggtctccatagtgagttctggactcctagggctgcatattgagaccccgtcacaaaaacaagacaaaatcaagaaatacacttacaaataaaaaataaattaaaaataaaaattaaaaaaggacattgtttccttcttactaggaagcaggagatgagctcagagctcatgtccctcatgtccctcatggacgacctatttcacagtttccttcagagtaagagcccattgtcatcaaagatgagagcattgtggtttgttcttaactaaaagacatttggtcttgctttaggaagaagacaggtgtacccactttattctttggttcggaactggtcccaagctgctgggagactagcatttgtctggaggaatgtcaagggcagactgaacaggttgctgaccctctctccctcttagtatataattgtgctggatatggctcatcctgatcaaagcagctttcttctggcagtaacattagggaatcttagaaacctaatagaaaaattttgcagtttaaacaaaattgacaagtagtcaaggaaaatatattttctttagtgatcacagctggcccatcctcaagctggcagaaccagtgccatgtaagcagcagagggtctaagggggtgacttcctcatctaaaataccaccaccgccacctgtcactctaccattagagcttaatccccagtgtctctaaagagctattttttttttctgcttctagagacccctactgacattaaaattcttatggaaaaagcagggattagtaacgaggaaataaattcttcaacctgacatgcaaaacatggcacagataccaccaaccccaatggattaacttgcactacactgactcccagagcattgtccctttagacaaactgaatttaattttctgcctggggcatacacaatttcccctgctaggaatatctgctaacccatcaactcccagtcttgctttttttttttcatttagcacataaaacattgtatcctgatgtcaaggctcttaaaatagtttaacatagccagaaatggtggcatactcctttaatcccagcactcgggaggcagaaccaggcagaactcttgaggaggccagcctggtctacagagagttctaggatagttagggctatacagagccccttcgtttttttgtttttgtttttttttttgttgtttttgtttttttgttttttgagacagagtttcctgtggaggctgttctggaactagctcttgtagaccaggctggtctcaaactcacagagatccgcctgcctctgcctctgcctcctgagtgctgggattaaaggcatgtgccaccactgccaggcaaagcctttgatttttcttttttttttttttctttttggtttgttgagacaggtttttctatggctttggaagctgtcctgcaagtcactctgtagaccaggctggccttgaactcacagagatccacctgcctccgcctcccaagtgttgggactaaaggcatgcgccaccactgcccggcaagtctttgattttcaataatggatattatttaattcttttaattttttttaaagattttatttattatatatacaacattctgcttccatgtatatctacacaccagaagagggcaccagatctcataacagatggttgtgagccaccatgtggttgctgggaattgaactcaggacctctggaagagcagttagtgttcttaacctctgagccatctctccagcccctacttaattcttttaatctttgactctcaaatctctctctttctttccctttctttcttggtttagcgagacagggtttctctttagctttggagtttgttctggaactcaatctgtagcccaggctggccttgaactcacaaagattcacctgtttctacccctcaagtgttgggacaaaaggcatgcgccaccaccaccctgcctgtttcttttctttcttgttttataaaaatatttgggacagaactgaccagataaaaatgttaggtcaccagccaagagagataagatacatccacacaagaataattaggataataagttcttgttaagggtacagcctgagcattctttgattaattcaggcagaaaaacaaaggtttcctttgaactgggcaagacagtctaaaatttcaattgttttatacaagtaattcaaatagaacaagtctattagtaactagcaagttactaattagcattataccccccatcggtataagctaattttctttctgtcttgtttaaaccagttgcaccttatgggtacaaataggatataaacataattctatttgttgagggcttgttgtgtgccaagaggatagtttgcataatctcttttttggggggggggcagggtttatttgtgtattcctgggtgtcctggaactgaatctgtagaccaggctagccttgaactctgagactgcctcttgggtgctgggatcaaaggcttgtaacagcatgccctgcttgtaatgattcaggcattatgctttcctgcccctgtcatctagcagaatgcactcaggcagtactctgatcagtccaggtgcaaaggaacccaagaaagaactctgttcacttatgctctttactgctgttcctctggagcagacaggacttttcctggcttcctcttctcttctgtcctctgactctttacctctgttctctttccttcccccctcactcccctttctaataaaacttctcacttaagctcttctgcttggcatgtttgtccttccatctccgaatccaccaaggttcccctggcagtttatcagaacacacacagctacctaactcaattttcagtctacgaaaactcaaatggaggtaatgtttgctggattccaaagttgtggatatatttaacctaattaactacacaaaagaagtttcattgtattatatttaaatgtatacattttggtgctaggcattgcaaccctggcttttttgcttgctaagcatgcacactaccactgaagtatattctcagccctggcatcagtagcccaataaacgagaaagtacttagcagggctggagaaatggctcagctgtttagtgcactagatcttacagagaaagttggaataatcctcagcactcagagatggattacaaccatctctaattccagtttcagtgggttcaataccatcttctgaccaggcacgtacatggtgcatatacgaatttatacatattaaacatggaatttgggggggggggaagtttgagacagggtttctctgtggctttggaggctgtcctggaactagctcttgtagaccaggctggtctcgaactaagagatccaccagcctctgcctgctgggattaaaggcgtgtgccaccaccgcccccgcccgcccggctcatattaaacatgtttttaaaaattatttaaagtttattttattaaccaggtatggtgggtggctcttgcttgtagtctcagcacttgggagaccaaggcagtttgttgtaagaggccaccatggtctgcatgatgagactaggttagcctgggctggagtgaaactgttttcaattttttttttttttttttaagatcatgctacaattataaatcattatttgagccgagtggtggtggtggtggcgcatgcctttaatctcagcgttcccagggcagaggcaggcggatctctgagttccaggccagcatggtctacagagggagtgccagtatagtaaggactacaaaaaccaaccaatcaaacacccctcccccgaaaaaaacaaagtttctttgtgcttaatccctcgaggttaacctctttattaagagctggctcaggtacctaccaaagacacaaaatgcgattcgggtcttttacgggaggaagtagctttccctttccttatcgcaaaaccgggtcaatcctagcctcttgggctagaacacgacgttataaacctctgacatcggtaggcgttcaaaaatatgttagtcgttttctgaagaagagtgctgggaacccagaaagcaatccgcatttgactacactgaggtctcgaggcccatcagccggaggacgttctcggtatctcgactaagcggctggccgttggcgatttcccgcgcagagagcagggcggagcgccagtcccgcaacgtggtagctggacccactctccgccagaactacacctcccagcaggaaccacgctggttcgcttggcaggtggtacccacgggtactagcccggaagctagccctacaatacttatagtagccagagtctggagttgcatctacgggaaaaggcggccttacgcagaggttttgccgcgcagcacgctgggagttgtagtccactcccgcgatgtctagaggctannnnnnnnnnnnnnnnnnnnnnnnnnnnnnnnnnnnnnnnnnnnnnnnnnnnnnnnnnnnnnnnnnnnnnnnnnnnnnnnnnnnnnnnnnnnnnnnnnnnnnnnnnnnnnnnnnnnnnnnnnnnnnnnnnnnnnnnnnnnnnnnnnnnnnnnnnnnnnnnnnnnnnnnnnnnnnnnnnnnnnnnnnnnnnnnnnnnnnnnnnnnnnnnnnnnnnnnnnnnnnnnnnnnnnnnnnnnnnnnnnnnnnnnnnnnnnnnnnnnnnnnnnnnnnnnnnnnnnnnnnnnnnnnnnnnnnnnnnnnnnnnnnnnnnnnntggccaggcctgggcaccctccttcctctcttgcttaggttgccctgggcttcctgctcccccccatcctagttggccgggccccacccagccccagggggcgccttcccttcccccccctccgggtttctgtcctggagggtgtggtttttctctcccacctcggtccctgtgtgtaggctggagctcccccgccacgctgtcgccctcattctgaccacctttccgctttgccgtctggctccggtcctgggactggtcgtaaagcccaacttctgcgctccagtctttctctacgtaacctgaagacatagttcaattttacttcttttcaatccggagggctttggcgttagttgaaacccaagtttccttcctcatgccctgttcttgtagtttggttgtgccacagtttattcttttctttaacgtaagttgaaagtgctttgtaaactgtaaagcgtgctgttagaattcaaatcataattctttagcctggtgcattccaactccgttttctttagcaccggatcactgtgctattctgttctcttactttcctcctgaattgtaagtttcgttgcccaggcatgtcaattgtcatcactcaggactgttttctcttggagttggtctttcctgctgtttcctgctttaacataaccctgtagtttactaccacctctacacctttctactttattttcagggtgcacatttgcctacattttgactttccccagcacttgtgtcaaggtctctccattaggtacccagagatcatcttttatttgaagagcatggcctttttgggtctttttggagtagagcgttgcactatttagccaaggctggcttccatctcaagatccccttgcctcagtttttctatggtgggatctcaagatgcttggattacaggcaatcactactgtgcctgtttattttatttttggttttcgagacaaggtttctctgtgtagctttggagcctagactggaactctatagactaggctgacctcaaattcagagatccgcctgcctctacctcttgagtgctggaattaaaagtcctgtaaccatctccccgacatccggcgaactttttttttcctttaagtgaattgtctttttacatgtctctctctctctctctctctctttttttttttttttttttttttttttnnnnnnnnnnnnnnnnnnnnnnnnnnnnnnnnnnnnnnnnnnnnnnnnnnnnnnnnnnnnnnnnnnnnnnnnnnnnnnnnnnnnnnnnnnnnnnnnnnnnnnnnnnnnnnnnnnnnnnnnnnnnnnnnnnnnnnnnnnnnnnnnnnnnnnnnnnnnnnnnnnnnnnnnncaggacttctctgtgaaactgtcctggaactcagtctgtagatcaggctggcctggaactcaacagagatccacctgcctctgccttctttaatggctgggattaaactgccacctcccggcttggtacagcactccctctgagttaactatttgtaaattcgtcctttgttttgagacagggttactctgtagccttggctgtcccacatctcgctctgtagatcagggtggccttggactcacagagatctacctgcctctgcctccagagtgctctgattataggtgtgtgccacagcttcctggtgcctgttcttttttttttttttttttttttttttttttttggtttttcgagacagggtttctctgtgtagctttggagcctatcctggcactcgctctggaaaggctggcctcgaactcacagagatctgcctacctctgcctcccgagtgctgggattaaaggcttacgcccaacacctaaattctgtagtgtagtttagacattggactagttctttggtatggtctccacctattttaggaaagaataaataaatccactctttggagatgatccattgtatcttgcttgccttcagggcctcttggctaggcctgtttttcagttgctatgaagatttggcttacagaacaaaggtgtttagtttcccattccaatcttctgcttgctgacttcatgtcttgctcagttttcctactttgggctcattcatgttctgtaagagacctctcccctcacccctagggcctgacctgtatttttctcacactgctgacccacaccctcccttgcttccttgctgcctctgaccttcaaaaactaaacatttcacagaaagggagattgttttgtttgacatagggtggaagtagtagcgtggaagagaatgaggccatgagaaaggattgtggtaattgcttctccggcctgtttcctgctgctctggtttcctctggtctctctttaaatgtgtattgggctagccatagtcatatgaagtgctcttcaggggtctctcttactactttgaagtataggagctttattattttgggagaaatggtggaagaacatggttacaagaatgagtttattttaattaatgaactttttattaatttattttttgagatgaagtttgggcagccaagctggcctcaaacccaaagtcgatctgccccagtctcttgagggctgggattacaggcacatgcctggttttaggttttgtttttttgttttttgtttgtttttcgagacagggtttctctgtgtagctttggagcctatcctggcactcactctggagaccaggctggtctcgaactcacagagatccgcctgcctctgcctcccgagtgctgggactaaaggtgagcgccaccaatacctggcttggttttaggttttgatgtttaccctttaagaatataaaatgcatttagaaagtataatcctgtcttgcaatgtagacatggtctaaagtgattttactttgaaatgttagccttgacattgtttttgtttgtttgaggtggcctcactacatagctcctactggcctgaaattcagagatagtcacctggaatgcagccttgatgtgttcatgtttgtttgagactctagccaggctggtttccaacccagggtgtagcctcaagttgttgcagtccttttctccagactcccaagtgctgggattccaggtctttgcttccatgctctgcttctgatagttttgcagctgttttgttgctgtttgcaaaatggagatgaacttggaggaagtcaaaggaagattttgtttaggaaatgccaccaaaagcctgtggtagagttttgcaagttttgactgagaaatccatctttcatctttctctttacaaagtcaaaccaaatttatcagttccgagttcccacaataagaatgtgtaaggcctatgtttgtgttgtttttttgcctttttcaaaaataagttttgtcttctttggcattgttttcttccaaagttaacctttttttgggggagtgatgggggtgcttggtgattgaacccagggttgaggatatactctgcaaatgagctataccttcaactccctgtacttcttaatgaaaggaaatttgttgaaaaatttgtctttttaaattcagggcctacaagtaggccaggttagctttgaatttgatgggtagccaagaataagcttgaactgctttctctgcctccacctttacctcttacaggtgtgctccacagggatgcttgagaaattctttgatatggggcattggagaccaggttttatgaatttttggctgtgggacacagttgcttgtggactgacttgagtttaagttggtacccagttaagtatttggaattaaggcctggaacagggctgtgttgagcagtgaagtcccttggttaagactaggcaatattctcgttttaaaagttgttagggggctgggtgtgatggcgcatggttttaatcccagcacacttgtaggcagaggcaggccatctctgtgaggtcaggtcatctctgagatcaggccagcctagtctacatagtcccaggataaccactgatttaaaaaaaaaaaaaaaaaagtgttaagagggctggagaggtagcttaggttaaaagctcttccaagtctgatgcgttgagtttgatccctggaatcccatgggagaatgacactgggttcctgtttattcatgcacacacacatgaataaaataattatgtttcttttaaaacgtcgttaggaatgtggaggtgtgggtgtggttgagtatggagagcttcttgctcaagcatcaaggcccagtcttcagtactgagagaaaaagtgttttttttttttttccccctccaatttggacattaaaacttactagaacataccttattgttctttttttatttttttattttatgtgcatttgtgtttttgcctgcatgtgtgtctgtgtgagggtgtgggatctcttggtactagatttacagttttaagatgccatgtgggtgctgggaattgaacttaggtcctctggaagagcagtcagtgctcttaatctctgaaccatctctccaactctacattattctttctctctctctttctttctttttaaaatactttatttaactttattttatgtgcattggtgtaaggataccagatctcctggatctggagttacagacaggtgtgagctgccattcgggtgctgggaatagaacctgggtcctctggaagagcagctactgctcttaaccactgagccatctccagccttcttttttttttgtttgtttttgtttttcgtgagagggtttctctgtggctttggaggctgtcctggaacttgctttgtagaccatggtggccttgaactcagagatggactacctgcctctgcctctcgagtggtgggattctggcctacattattgtttctaaggctaaaaaattaatttttttcttttaaagtttttttttgttttgttttatgtgtatgaatgttttgcctgaatgtacaacaggtgtgtgcctggtgcccatggaggccagaagagtcattggatccagtggaattggagttggttatgtatgagtcaccatgtatgtactgagaattggatgttaggtgctctgcaaaagcagttagtcctcttaatgctgcaaatctttccagcctcaagaatattttaaaaaattatttgtagaggagaaaatttctgtttttcttttttctttttttgagtctgggttttgctgtatggctctggctgacatggaacttacgtcatagctgaggctggttttaggctcatagtgatcctcctgtctcagcctccttaatgcggctgagtttaaaggcaagtgccaccacacctgtcttaaaggttccattttaaaggtgtccttgctgggtctgacacacacctgtaatcccagtttgtgattgcagcaggaggatcatcacagatttgctgatgccccccctacattttgagttccaagcctgctttgactctatagtgaggctttgtttcaaaaaagcaaaccaaaaaacagaagcctacttattttcttgtttaataactgaacattgccaaaacttttacaatgaaaatgctaccccttagattgcacatgatggactcgtataatctaggcatctaagcatactgcttctgtctgtgagattgaaagatatattgggttttagtatggttaacttaaaggagcagtatgttacgataattacaatatcagcacctttcacaatgatactggggccaacaatattctcagattaggttcagactatttggagtgtttttgtataggaggtaaagaaataaaagggtgtgtgtacaaagaaagtggaattagagagaaaggaccttcaagcaattctgaaccatcaaatttttttccctatatgttccccccttctgatttttcagatatctctgtgtagcctaggctgcccaggaactcagtagatcaggctgaactgctctagttcaggacaagaggtgaaggcaggaggttcaggtgtgtcacttgtggcattcctcctacctgtatctctcaagttcagggacacaggagtgctccaaatcctctgaaaagtggatttcatttggttctcaacccctgagtcagaggactcttgtggatgttgaaggactctttcacaggggatgcctaagaacatcaggaaacacagatttacattatgattcataacaacagcaaaattacagttaggaaatcgcaatgaaaattatggttgggggtaaccacaacatgaggaactgtatgaaagggtggaggcattaggaaggttgagaaccgtttctctttgtttgttgctgaaaccttgtttctttctttcttttggggggaggggaggttttcgagacagggtttctctgtggctttggaggctgtcctggaactagctcttgtagaccaggctggtctggagctcacagagggtctgcctgcctctgcctcccaaatgccttggggaaaccttgtttctttttggtgttatttgttaacttgtatttactagaacctttctatattaaatttctattgtgtatacacatttcagtaatatctaaattaaattccacattttgttttgtttttttgagagagggctaacttggaactcactctgtagataaggctggcttggaactcacagagatctacctgcctctgcctcctgagtgctgggatcaatcaaaggtgtggaccacaaccatctggctgtttccacattttaagaacttttaatgtatgtttgcttatataagtgtattctgtgtgtgcatttggaccatgtacaggttacctcttgttcatttttgtccttccttaggccagctggagttacaggcagttgtgagctgcctgacaagtgtgctggaaactgcagctcatactcttaactgctgagctgtgtttctagtgtgcctcccccctcccagaaaatctacttatgtcccccattgctggcctgtaactctccttgtatacaccagactggccttgaacttactgtgctcagataaaaggcatgccccaccatacctactttataagtttggtttattttatttatttatttttttaatgtgtgtcaatctcattttgagaggcagtaaaggcatataacaaggatggaggtgctgcaacccagtgataagagtgcttgcctagaccttagattcagttctttgtactgttcccctcttcaaaacagtgattgggaaatatctgcacacttataggagaagccagatattgcacatcaaaagccttagttaagtggcggttcactattttactcccacaaaagatggtaatgtgatagagttggcacaatgagatgtacccaaactaaggtaggtactcttggtctggctgggagtgggaaggaagtggcaggttttatttgctggctagattgtgataattacaaagcttagaaaatacactaaaagtcatttaattacatatttaaagtggactttatgttttgaccatcccccactaaaattttggggatactgtgaggtgagcaaattgaacagataaacaaaaatttcaagcagcatatattaacctacaatttttaccagttatgataaccaagcattagaagtccattatcttttttaggttccccacaggcgtaggaaacagtatttgatcaaggtttcctaatctcaaaattagtagatttcaagtctgacttctggactagtgctcttaatcatgctactttactactttgcttgtctgaaatactgctatctgggagtacagccaggtgctagctgataaaccaaagtaagcaagcaaaggaaaggaaatctaacacctttgtagtgttgaaggctgtgtctcgatactagataaggactaggaatgggatgcagaggtggggtctttgaaccgtgtagagttccatcagacttcacacatctattttgctatcttatttattctatgtggaagcatttgagttgaacttttccttaagtttttccattctgatttttggtagcttttgagatccgtgtggtgaactgatatctaagccctgtgccagtttatatgtatcctatgaagtggtcgggcacatacattgaggatcactgtgttttctcaaaggagctatatccccaggcttcttcctttcttttcccttccttccttccttccttcctttttctttctttttaaaaagatttattatgaatacaacattctgcctgcatgtatgtctgcacaccagatgagggcaccagatctcatagatggatgtgagccaccagtgggtgctgggaatttaacctgggtcctctggaagagcaaccagtgcgcttaaccactgagccatctctccagccctctttacatcctgttgctctaacccgccaaagccgtattcatgccccagcacttgctttaccctaagctaccttactttcccaggtaattactgatgctagtagagcacacaatttgtgtcaaggggacacactcaagtcttgaattttatatttcaggaataagaaaacgaaatagtgttgagtatttaaggacaaatgcaggagagcaaaagggaagactgcaaacaggaatcgtaacctgggggtagcatttcttttgttggagtgataaagtgatggaaaccagactgaaggttaagcagctggctagagaagaatggagacaatgactgtattccttagggaaagagctgaagtagtcattgtttgcaacagagcattcagtttccagtagtgaatgggaggaactatttttttgaactttcattcttgaggttaatgtgcacctagataacagtttaacaggtctttctacattaccatctgggaaatagatcaggaatactttttatgaatagtgtggtgagagatttccttatttaagggattttgtgtttttggtgttttagtaaaagctgacattggtaggtacttaagtagcaggtgtgttgatattttttaaatggatcacattgcttgattggcacattctttttgttttgttttgttttgagacagggtttctctgtggctttggaggttgtcctggaactagctgttgtaaaccaggctggtctggaactcacagagaaccacctgcctctgcctccgagtgctgggactaaaggtgtgcaccaccacggccttgcatgattggcacattctttaggtaacttgacatttaataaaattggttttgggacagtgaaacagtaataaggatgctaatagaataaaagcatttttcttttaaaaaattatacatttttggggaggcagaggcaggtggatttctgagttttaggccagcctgacctacagagtgggttccaggatagtcaggtctgcatagagaaatcctgtcttgaagaaccaaaagaaaaaagaaaaggaaagaaaaaatcctaactttgtagtactatctagagataatatacttttatcttgaaattgctccccactagctggacattgtgtagcaccctttaatcctaacactcaggaggcaaaggcaggcagatctctgtctagtctacaagagctagttccaggacagcctccaaagctacatggaaaaaccctgtctcaaagaaagaaagaaaagaaaagaaaaggtgtggaccaccactgccgggcgggaagatagcttaattatccaaatcagcaaggaattcgttctgtaacttagtgaaaatcaaaggagttttgagtgtttgaagacttgaaggctctataatgatacggttaaaaatacccttcctactttaaaaaaggtctgtgaatcagtgatttaaaacagtaaagatgtttaagaaatgcatgacaggaaaactatttgaagaattgcattgtccttgggtttggaattttggttttggaaagtagccatcttgtgctgccccgaagttaagtagacataagtactgctactttgagaagtcacccgaggataagaaagcaagatgtgatgatgaatttacgttaggaaagcagttcttaggtctgccttcaaataaacttggaattatttcctttctcaatcatcagttaaaataactgatgagtcagaaaaattactgttggtttgggtttttttgagacagggtttctctgtgtagccctggctgtcctggaactcattctgtgtaccaggctggccttgaactcagatccatttgcctctgcctctcaaatgctaggattaaaggggtgtgccaccactagtaggcttaaaattagtgtttgtaatactctgttgccaaggaagtaaaaaactgcatttatttattttacatctatctatctatctatctatctatctatctatctatctatctatctatttatctatctgtctaatctatctgagacagggtctctatatagtcctggctatcctgcaacttactctatagaccaggctggtgttaactcatggaggcattctgcatcttccttgataatgctgggattgaaggcagcatgtatcagcatgcttgccaacactgcttttttgcaggggatgggagagtgggggttcaagacagggtttctctgtgactttggaggccatcctggaactagctcttgcagaccaggctggtctcgaactcacagagatctgccaacctctgcttcccaagtgctgggatcaaaggcatgtgccaccgccaccaccacctggccgccaccactgcttttagaaagaatttgtattgtaaaagggtggaaccaaacaatttgggcctagcatggtggcacaagcctttctgtaatggccgtacttggaaatggtggcaggtggatcctgtgagttaaaggttgacctggtttacattgggaattcaagccagccaaggctatgtaactagacaagagttgtttttttcttttttcttttcttttttcatctgggtctttgtaataaacatgtaaatacatatttacagtggagatgctttctaatagaaagtaaatacacaaaagaaattttggtcttcaccagaatccatcattatatatccatttctgaagatgatgtgaaacaattacatcaagttcatttatatttaagattcctatacacataattcaaacagagtaacacacagttttcttatataattaatgcttcattttgcatttcagttttcctttaagaagactccattatccaacagtagggagctctatgagtttttgtacaactgtctgcaaccttcatcctgatctgacattataaacactgtcactcagcctgcactgttcatgccatctggacacgtctcacattatgtagagagttgttttttcttttctttctttttgtttttttgagacagggtttctctgtagctttggaggctgtcttggaactctctcagtagaccaggctggtcttgactgaactgaagttgtcaggtttggtggcagtggtctttacttgttgatccatcttgctggcctggctttttatttcttgagataggtctaactgtgtacagcacaggtgagcctggagcttaccatctcctacttcagtttcttttgtttttttttcttcttcgagacagggtttctctgtattgttttggaggctgtcctggaactagctcttgtagaccaggctggtctcgaactcagagatccgcctctgcctcccagtgctgggattaaaggcatgtgccaccaccgcccggctctacttcagtttcttgaatgctaggattcctttgaagtttgctttagtatccataataatactaatacttagctgaactgagtaagtgaagtgctatacattttaaggtttattttagttatgagatgtgtctgtgtgttgctgtctgcagaggtcagaagagggtatcagatcctttaaagcaggattgtctattagctgtgtcttaatgtgctgggaattgagtgtcgtctagaagagagtagtaagtgcttctaagcactgagccatctctctagccccaaggcgctataattgtaatgctactttgctttcatattttacttttattttttattttattttctcaagacaggatttctctgtaggtagtcctggctgtcctggaattcattttgtagatcaggctggccttgaattcatagagatccatctgtctctccttcccaagtgctgggactaaaggtgttctccaccactgcctggcttatattttagtttatttatggatagccatcactatggtgcagaaagagccttggagaagtacatttcactcagctgtttatttgttctgagacaggatctctctttgtagccttgattggcctacaacatatatccgactgttctcaaatttgtggtgatcctacagtttgtctcaagacttactggaaggagttaccacacatgaatcactatggctttttgtttgtttatttattttttaaggtagggtctcaagcccaggctggaacttaatatgtagctcaggctaacctcatattcttgggactcatcctatttcatcttttcaagggaggatgtaatttcaggcacagaccagtgtgcccagcatagtataatatcctaatgataatactgtctggatattatttgagaagtgcttgttagagtgaatataaagttttgtgtgtgggtgtgtgtaggtatgtgtatgctatgatttgaatccaggcctcatggtccttcatgcatgctgtaggaatattctttaactttgtcttagacctttgtcaaagaaacagaaggatcaccacaagtttgaggacagtgtgatatatgtagtaggccaatcagggctacaaagagagaccctgtctcagaacaaataaacagctgagtgaatacacttccaaggctctttctacatcataggtcctgtgaaacactgtatgtatatgggctttttgtttgtttgttttgtagacaagtctgttagaacttagggttaaagattagtttgagtaatgagtgacttttcaagggcaaaagaggatttaaaggctgggtatgtagctcagtggtagatggttgcctaagcatgtatgaagtcctggatttgatccctagcactatgaaagatttgagcaataaaataataaaaaagatgaggctttagagctgagaaagctggataggaatgggacacaagtatggaaaaagccacaggcaatgaaatacttttccttttttgactgtgggtagctggatacaatttgtctgtaccaaataagatttgatgtcctctaatgttcaagagttcaccagcactcatttttttcacaagcaggttataagcacagccccactgacaacactgggtgggtgtaggagttcatccttgtccaccagctgctagaggcctgaccctgccctctgcagctgtggagaataaaagtatcagcttggtcagctcctggcatgtgaacactagcagttgagctgcatggaattagggctcataattgaatgtttggcaccctcgttgccatattctctcccagattggcagtgctgatttcttcttgttgcctgtcctggaccagtagagattttttactaagttaatttcccaggcagaaaaaggttatgaataatggattctgatagaaaaaggaaaaatgcatattggatattaaatgaaggtaataaactagaactggtcacaagagttcaataatgttaacgacacagagggagtaattgttgggtatttgaaaggctgtggatcttgttggaattctggcccagactagatattttggattagggatgaggcattcaggtgatgtcaacagttgctgcctcataggaggaggccaggttgggggatgagtgtacacttgggatcatcttttccaaagaaagagactcagaactgagtaatactctctctgaaagcattcgtccttttttgtgggtgaatgtgtatagaggccagaagttgattctggatgttttccttagttctctacctcatttttgtatgagtctttctctgaacccagtttgacagttcagctagattagctgaccacgtgtcccggagatacttaggtccacctcatcagccctagaaattacaggtgtgcaccaccatgcttggcttttatgtgagtcctggggcttgaactcacattgtcatgtttgtgggacaaggaagcatattcccggcctttctttgagcatttttggtggcgtcttgcttgtttttttgagaggtctccctgtatactcctctctggcctggaactcacaagtggagtggaacttgtggcagtcctcatttgacctccttaatgttggaagtagatcactgactgttcttccaggggtttgattcccacatggtggctcacaactatttctaattccagttacaaggggtctgctgtcctcttctggccaggcatgtacagataaaatatacaaacaaatgtaccatatacataattttgtttttatttttaaatgagcgcaaatgcacatgtgcttgcctaaggagtccagagatgttggatcccctggagctgtagtaataggcagctcagctgccagatgtagatgtagggattgaatttggatcctctgaaagaacagtacatcatcttaactgcctagcaatctttctagttccatgtgtgttaacttttaaagattatatgttttatgtgtttgtgtgtgtgtacctgagtggacatatgtgcactatatgtatgcaggttctcaaggaggcagatagcttataacaattctcagttcattctaaactgagaagtcatatctcccttcttcctcctccctgccccccagcagcagggattgaacccaggacctcttaaatgctagggaagcaatctgtcactgagctggatcatctgctctgctgggatctcttggaaacagttgtttgtctgaagtaccttacttgcaaaggaaaataattatcagtttaaactttttctaggatcattaagatggctcagtgggtaaaatcacttgtttcaaaacctgatgacctgagtttgacccctagaaacctaactccctaaagtagacctgacttccatatatgtacactctccttatgtcacaactgtagaccatttatttgtactttaggtaatggaggaaatttctgattttcttttaaagaagttaaaaatgtatcaacaattctaagttaaaatctatcactatcacgtttttagtttactttgaataaggtgaggtaaaaagaatagaaatttcatttggtgtttgattttctgtctttcatttgtgttttgaaatttcactgggcatattggagtaacctcatgctttctgtagctcaagaacctgagatatggaacagttcctgacagattatttttagaagtcttgctcttgtctgtttctattctaagaattctcttggaacttgttccagagtagtagagctgatggaaaacagtgtaaatgcagttcctatgcctggcagttgggtgtgtgctgcagacacagctctatttactacataaggttctgtttccaaaggaagacagaatttctccatgtattttggtgtgctagttgaaggtgtttctttttaatctggtttccattccttccattttcaatttataggcagtttaaaannnnnnnnnnnnnnnnagtggaatgttcagagatgggacttggtagaagtgatgagaccatgagggctccaacctaagcaaggggttctccactgatgataagtggtggaaactaaatgccagggcttggttggaggaactgggcttctgtggtgagtgtttttactcccgctggagctgtttcaccctccacctctatttaaaaacaaaacaaaacaaaacaacatttatttatttattatgtatacagtgttctgcccgcatatatgcctgcaggccagaagaggacaccaaatctcactatagatgattgtgagccaccatgtggttgctgggaattgaactcaggacctctggaagagcagtgagtgctcttaacagctgagccatctctccagcctcttccacctctatttttgtttgctaaatttcataaaattgtaggtgcatgtgtgcctgttttcttttgtagtagggatagtacccaggacttcacatatgccagaaaagtgttctgccactgagctgtgtaatttatctaattatttgtatgtatgcatgcatgcatgtatgtgtatgcctgtggaaaacagaaaaaaaaaggacatgtcatttttcaaataatacttaaacataatggaagcaatgtaaagctaagagtcctggtatataccaataatcctagcacttgggaggctgagacaggaggattgtttgtgttctgggccagcctaggcaagtgcctatctcaaaaataaaataaaataaaaaaaaaataataaaaaaaataaaaacccgggctggagggccacctcagtagttaagagcacttactgctcttgcagagtagttcccagcatccttgtaacagttcacaaccattcttcagttccaggaaatctgatgacttttcattcctcctggggtacgaggcacacaagtgaatacacatacatgcaggtaaagtgctcacgcataaaaatatatctttaacttaaaaaccagctggtgctggtggcacacacccacaatcccagtactagggaggaagagacagatcaagtattcaaggttattataaactacataaagagtttggggctggacctgaggtttgtaagactatctccgataaataaataaggggaaagaaatccaaaaacaaactataagctataaattgagtggttctttacaaagcaactattttgtctgggtttggttgatcatgcctttgatcctattatttaaggcagaagtaggctctctgaattcaaggccagccttgtagtcattatagctccaggacagtcaggactgtcaggcaacgattcctcaaaacagaacatactattttgctccttgaactggggccattttttttttctttttaaatcaaataatcacatcttcattaaggatgctttacttgctgattaagtggagataaaaaatttaaatgtttaagccaggcagtggtggtgcacacctttgtttcaagcacgtgggaggcagaggcaggtggatctgggtgagttcaaggccagctggtctatgaagtgagttccagaacagctggggttgttacacagagaaacaacctgtctccaaaaacaaacaaacaaacaaaatttaactgtttatactcagtgaattagtgagattgtttatttttttattttttatttttttggttttttgagacagggtttccctgtggctttggaggctgtcctggtactagctcttgtagaccaggctggcctcgaactcacagagatccacctgcctctgcctcccaagtgctgggattaaaggcgtgcaccaccaatgcccggggagattgtttatttttaaacattttgtgtatatagatgtttttcctgtaggcatgtctgtgcacctggtgcctgcaatgcccagggaagccagaagagggtgtcataccctttgggactgaagttacagatagctacagactgccacatgtgtgttggaaattgaatctgggtcctctggaagatcagccaacacttttaacttctgtgccatttttacagtccttaaataataatgatgatgatgatgttttttttttttgagacagggtttccctgtggctttgaagtctgtcctggaactagctctatagaccaagctggtcttcaactcacagaaatctgcctgcctctgccttccaagtgctgggatcaaaggcgtgcgccaacactacggggcctgaaattatttttaatgaaggagtcttttgttttttgtaatagggtctcattatatagtcctttttggtttgcaattcactgtgtagactaggcaggtgttgaactcatccatctgcctctgcaggacctaactcaaaaaagatattcattcattcgtttatttatttaatgtgtggctttgtgagtgtgagtaccaagtgccgtagagaccagaggcattggatgtaattggagttaagggagttgtaagtagcttggaactgaacttgggtcctatgcaggagcagtctgtggtcttcatctctgagctatctttccagccctgaattaatttttaaaattatgcagttaatgtttgtgtgcttatggggcacagggccatgatgcaaacatggaggttaaaaaacaaattgtggtagttggttttctccttctacttataggttctagggattgaacccaggtttttaggcttggcagcaagtgtctttttagccatattgctggcccctaatttttattttagttttgttccttttttttttttttttttttttttttttttgagacattgtttctctgtgtagtcctggctgtcccggaactcaatttggagactaggctggttttgaagttagctatccacctatctctgcttctcaagtgctgggattaaaggccagcgcaactaccaacactaattctctttaatttaaaattttattattgtgggccagtgctcacatgtggagaccagaggacatttttaggcaattggttctctccttccactcttattaaacttaggttgtcaggtgttctcagcaatcactcttacctactaagctatcttgtgtagctagcttttttgtcagactgtcttgactgctagccaaaaaataacaagacagacttcttaattatgaaagcttagatttgtccccaacgagctcatttgtttcctttgttttttgagacagaatttctctgtagttggagcctgtcctagaactcaaaataatatttttctcaaaatgcaaaaatttgggggccagcaaaatgactcagtaattaaagatacttgctactaaacctcacaaccgaagttaagtcaccaggacccatttaatgcaaggcgataactgactcctgcaagttttcctatgacaattccaacatggcacacataaaataaatgaatgttttatttttctgaagagtattttttaaaagttggggctggggataatatagcacagtaggtagtatcctgagccagcatgcatgaaaccctgaatgattccctagcactacataaagcagggtatactgaagcacaactgttgttctacattcaggtagagatagaaaaccacaaatgcaaatccatccttacctacaaagtaagtttgagaccagcctggaatacaggggatcctattcctcctaaaaagagcaagattgttgtagaatatttatttacactgtagagatgcgtctctacttaaggcaccttctcgttgatttaatacaaagctaaatggccaatagctaggctagagagaataggcaggacttctggtcagagagaggaagtcagagggacgaatcaaggcaggagagagacgtggatcgagtctgtattgtgttgaggaaaggtaaaaggcacatggcagaatgtagattaataaaagcaggttaatctgagttgagggccaggtggtggttcatgcctttaatcccagcacttgggaggcagaggcaggtgtatttctgttgcgttcgagttccaggacagccagggctacacagagaaaccctgtctcaaaaaactgggggaaaaaaaaaaaaaaaaaaaaaaaggaaagtcagagctgtaggtcaaaagtagagtgcctattttgtatttgtgaggccttaggttcaatccccagtcctgccagtctctctcttttctctctctccctccctctccccattcccctctcttgggttttgtgtagctctgagaaatcctcttgcctctacctcctaagtactgggaatacctgacttcctactgagatctttaaagcagaacaggatgcctcagtgggtaaaaagatttgctacacaaattgagacctgagttcagtttcctggatcctactgtagaaggaacactgactctctgacctccacacaaaaaccatagtaaaataaaaatttaaagtaatacaattatggtaaaacaaacttattctgtataatggaaacaaccaaatttacaatctgaaagttgtcaagcacaagataggataaggagtgtgattcatagtgctgagagacagttggaagtaaggtaaaatgtttaaactagctgttggggtatttggcatgttctagttaattggttatctgctgttataatgtaaaaagcagtgtagtaacatacccagttagtacaggacctcttgtgaaagtaaatatcagggtgtctgtttaagaaaatgtgtggccttttctaactgacacatttcatttgtagtgtctgaagtagtgtaatgagttttggttaatgtcttagtcactcttctattgctgtgaaaagaccatcagcaaggtaactcttagaaaagaaagtattaatttttgcttacagtttcagtggtggttcattgtcaccatggtggggagcattgcagtaggcaccaagcatggttctggaaaagtagctgagatatcacacatctgttccatgagttctaggcagagatactgggccttcaaagcccacccccagtgatacaccttttcttttcttttttggttttttgagacagggtttctctgtgtagctttggagcctaacctggcacttgctcttgagaccaggctggcctcgaactcacagagatccacctgcctctgcctctcgagtgctgggattaaaggcatgtgccaccaacgcccggcttgtgatacaccttttctaacaaggctgcactacatctcttaatccttccccaaagttccactaactgggaatcaagtattcaaacatagactcaatgagaaccattttcattcaaagcatcacagtttcttgtagtttatgtagtaaaggataacctgggagtatttgttgcaatggtgtctctatagcctgaaccatgtaaattaagattatagggacactgatccttgtagtctctgagctttccatgcttggtaagcagcattcaggatgttgtcttctggaagaataagtgctctgatcacggagctaccttcccagtctctcagggtctcctttatcctagactggcctggttctctcattataactgaggatgaccttgaatttctgatgtcttttcctccccaggcctagaattacatatgtatgtcactatatccagttttatagggagctggggattgaacccaggttgtgtgctagatgagctgtctaccaactgagctgcatccccatccctgtggtctcataaacacttaagattatgaagacaagtctggaaacagaatagctaaaataagatctgagttgattgtagattctgtagaatccaaaggaaagcagtccataaaaggaaggccaggagagtgtggtcagttataccaggggctaaagcaacacagtaggttttgtggttagtatgggcagcataatggaaccacacatcaaagataagagaacagaggaagggggggggcaagggagagggaaagctgctagggaaataatctaaacagttcttgcatactattttagatattttctttcttttttttttaagatttatttattatgcatacgacgacgatctgtctgcatgtgtccctgcaggctagaagagggcaccagatctcattatggatggttgtgagccatcatgtggttgctgggaattgaactcaggacctctggaagagcagtcagtgctcttaacctctgagccatctctccagcccagctattttcttttttcaattaaatttattttatgaatatgagtgtatctgcacgtacaacttcatgccagaagagggcaccagatcttattatggatggttgtgagccaccatgtggtttctgggaatttaactcaggacctctggaagagcagccagtgcttaaacactgagccatctctcttgtctgtctgtctgtctttcccccgaccgccccccccccaccaccactcctttgtttctttgagacagaatctctctgtagccatgactggcctggaatttgctatgtgtagaccaggctggcgtcaacttagatctcccagtctcagccttctgtgtgctggaattaaaggcgtgcattaccatacttagctctatttgaaaaaatattctgaatgttttattttgtgtgtcacccccattagatgtttgtttttgccatgatttggaagttttgcttacaatgccttctttgttgcagattttgtattttgtacatacattattttgtatattctgtatatgatgacttcggtgagcaatgatcgttgccgaggtgctcgggaaaaaccacagatgccaacaacacatgcaggacagccacagaaacaagtgatacaggtaagtcttgggttagactaaaagagtgagggagaaggaatgtgttaatagctcctttctagggaactcaggatttagcattgtgtttacaaactaaataagtagtatacgaaagggatgatgtgacgatggtacaatcgaacggtgttccaggagaagcatgtgtttaagcctgaatttcagttgttatctctgctacagcagttcccttccttccttctttgtctcatgttccagtttataccactaggaattaaacccagggcccctgtgttctagaccagcactctactactgaactacacgcccagctcatctgttattctttcaagtgaagtgagacatgttagtacagcacggaacatgtctgtactataatgatccagttgacaagcttcttaacagaaacagtatctttcccccttcatatgttcattattatccttacatttactaaccgtgtgtgtgcaagcttgtgcatgcacacgtgcacatagatcattgtgctttttgaagtcaaaggacagctagagagagcgagttctctccttgtaccatttgaattcaggatggaactcgggagtcagggttggccataaagacccttactcactgagccatctgcttagagatgttgctctgcttcagcttcccaggtgctggggtgtcagacttggactaccatggttcacttttatgatactttgttttatttctgatattgggttgggacatagggttttgcatatgaggcaagtattatatcaaccagttatgtcccttattcttttcaggagcttcatgtaatttcatactgaagtgttctattatgtttggtacagagtagaatttttttttttttttaagattttatttatttattacatatacagcagagggcaccagatctcattcaaggtggttgtgagccaccatatggttgccgggaattgaactcaggacctctggaagagcagtcagtgctgttaaccgctgagccatctctccagcccctagaatttttttttttttttaacaaaatttttgtgttaaattgaatagaaaaatagcttttttttttttttttttttttttttttttggctgctattaacagataaatatctcctatgttagtgcttacccctaagttctttaactctgatcagtattcttcacaaagaaagactgctgtgctgagtgttgtaacacagtcctttaatctcagcacccaagacagaggcaggcagatctctgagtttgaggccagcctggtctgtatagcaagttcaggctagccagaatcgaacaacataggagaccctgttgttagagaactgttgcggctaggctatccttttaagtttagttaatgaattgtcttgaattaatgaagaaatataggtcagaataaccaaaggtgaagggatgatgatgatgatgatgataaagttagtctttaaaaagaaattgtatcattaaaaacaaaaaagtaccaggcgttggtgccgcacgcctttaatcccagcactccctttaatcccagcactcaggaggcagaggcccgtggatctctgtgagttcgagaccagcctggtctaaaagagctagttccaggacagcctccaaagccacagagaaaccctgtctcgaaaaacaaacaaacaaaaaaagtatgtataacaggctttcttttgtgcctctagccagctcccaaatcgtgacaagaagacttgttaattagttatgaatgcttggccttgtgcttattccactagctcttataatttaaagtaacctgcttctctgtatctacattttgccttatggctttgtacttttcttttattctgtatgtcttaatttttcctgtttcttccatgtctggctgtctggcggctgcctgactggctggcccctggcatctccccctcgccctcgttttcttttctcttctccctcctctctcctgagcctagattccttctacttattctctctgcccaccaaccccgcctatccctcttctgcttagctattggccattcatctttttattagactttaggcaggcaaggtgaaacagcaacacatctttacataattaaacaaatgcagcataaacaatgtcacacatttttatattgttagacaaaagcagcataaacaaaagtaatactcttttacttgataagtaatattccataacaagtatgagcttttgaaggaaggccaaataaatgtgaatgatgcaaatggtaccctgtataccttgctagcagacttggatggattgtcagccagtttgcagactagaacagggaattagttttgttttgtttttccttctaaaagggttttatttttattgtgtttcattttcagtagtttgagacagggtcttgctatgtagcccaggatggcccagagctttcgggtatccagtactggtctcaaaactttaaatttccattcctcagcctccctggaatttggactacattaaaagattttcactaatagcctttctgtggagcctttgagggatgacttagattgcctaaaggaaaaagctgctgactgatcaatgaggatgagttcgagatcctcctgcttctttttttgggctttttgtttatttgctttgctttttaaggtatttattcaaaagtaatattacatatatgtgcattttcctgtatttctgtctgctcactgtgtgtgcctgcctgtgacggccaaaagagggtgtctgttggatcccctggaactggagttacagatggtgagccaccatgtgggtgctgaaaattgaacctaggtcctctggaagagcagccagtgctcttaatggctgagccatctccaatgctttttttgtttgtttgtttttttgttttaagacagaatgtcatagctcaggtcggtccagcttgctatatcatccaggctgctgtctaattgaatgcatacttggtttatagatgtataccatcgtgtggcttttcttttttatattttatttatgtgtatgggtattttgcatgcataaatatctgtaccacatacacagttaatagacagttgtaagctaccatgtgtgtttggaaatccaacctgggtccttgggaggagcaatcagtgatcttaaccaccaagccatctctagccctgtttcctgtttttttttgttcttttgttttgttttgttttgttttttaagattttattttatatattatgtatacaacattctgcttccatgtatatctgcacaccagaagagggcaccagatctcataatggatggttctgagccaccatgtagttgctgggaattgaactcaggacctctggaagagcaggctgtgcttaacctcttaacctctgagccatctatccagccctttgttttgttttctttaaagatttattttatctataagataaatatacataataaatatatgctctgtctgcatgtacacctgcatctcataagaggacatgagaggctgggcgttgctggcacacacctttaatcccagcactcaggaggcagaggcaggtggatctctgtaagttcgaggccagcctggtctccagagcgagtgccaggataggctccaaagctacacagagaaaccctgtctcgaaaaacaaaacaaaacaaaacaaaacaaaacaaacaaaaaaaaaaggacatgcgatcccattacatatggctatgagccactatgtggttgtggtattgtaggatggtgagattgctgagtggttaaagctcacaccatataagcctcgagttctgagtttgacaagcccaggaagacacaaaaagctgttttcttttacatgcatgccatggcatgtacaagcctgtactcacatatgttaataataataatagtaaaaagggctttaaaaaatggaatcttatgaagttgccccaagatggtctcaaaaaaattgtcttcaagccatcttcttgtcatagcctgacatgtagctgaaataattaaattttctttttgttcatttttgagatagagtctgttgagtatctctggctgttctggaacttgctatgaagaccaggctggcctgaaactcacagaaatccacctgcctctgcctcctgagtactgggattaaagtaatgcaccactatgcacttgctgataattattttcagatactgctttttataaaattatttggaggatactactaggacatttttatgttagactgaggtgtttcttgcttggtggtaaaacatttgactaacatacatcaagtgccagtttcaagacccagcacaatatacacatgaatacacacttggggatgtaacctagttatagtgaagtacttgcctaacatgcccgaatccctgggttccgtcttcagcaccatgaaaactggccatggtggaacaagcctgtactcatctcagcactcaggaaatggaggcaggagcatcagaagttcagggttatctttggctatagtgtgtttgaagccagcctacgctgcgagagaccccagagagaagagaaaatgattgttaaattatatgttaattacaatataaaaatatttcctgtaagttaccttaaagagtattggttaggatagtaattgttcactaaatggccagttgcagaccttttctgtccaagttaagtgctgaaagagctgttttgagtttgtgtaaacctgagtttgggtcttgggcctacatcattttttaaatttatttatttatttgtttatttgacagggtttctctgtggctttggaaccttttctgaaattagctctcttatagaccaggctgatcttgaactcacagagatcctcttgcctctgcctcccaagtgctgggattaaagccgtgggccaccaccaccaggcctgggtctacatctttattaattaggcaagatagaatttctggagtgcttttgttcatggcaatataacgtctgtcctttttagttaagtatatgtaggcatcagttctctccagtcagtgtctctctttgtcctcctcttccccatgccaactcagtttatgctcagcacaggctgttcctctcagcctccctcacttctgcctcctgaatagctggaatttcaagtttgccattagtaggataggcttgttcttcagtttcttgtcattgacatattaaagagtataggatagttatattctacattatctttgaatttgagtttatatgatactttatgattagaattaattatatacttttggtataagtaaatgtgatctattatttccccccccttttcagtagtaggcatcaaactcaaaagcttgcatatattaggcaaatgttctttctgcttctgaactgtagcctcaactggatgtgatttgtattttacataccatattatgatataataggttctaagtttgttctgttttaccagaacaaagtagttagtattcctctagtgtctcagagaggccaactggttttaaaatacaaaacagttttaattctttgcagaatgattataaggaattagaaattatatacaattgttatcagaaagtggtaattttttgtatatttattccacataaattataaaattattatttgaaatttgaggtggacatggtggttcatgcctgtaatcccagcagtaggcaggcttagaggattacaaattagaagtcagggtcggtgaaaaggctctgccagtaaaggtccttgctaccaagactgacaacctgagtttgaccttgggtctcacaagattaaagaagtgttccagcgagtgttggtggctcaggactttaatcccagcactcaggaggcagaggcaggtggatctctgtgagttcaaggccagcctggtctccagagcgagtgccagcataggctccaaagctacacagagaaaccctgtcttgaaaatccaaaaaaccctccacatgggtactctgcgaggatatgcatacccacatacatacaataaataaattaattttaaaaagcaagatggcaggatgtggtaattgcatacctttaatctcagcacacaggcagaggcaggcaaatttctgcacgttagaggttagcctcgtctgcatatacatagcaagttctaggatttccacagctacatagagataccccatctcagaaaacaatataagcaagtagaaaataaaattatatcaaatattatagaaaacaggtggtttcagggctggagaggtggctcagaggttaggaacactgactgctcttccagaggtcctgagttcaattcccagtaaccacatggtggctcaaaagccatctataatgagatctggtgccctcttctggtgtgcagatatacatggaagcagaatgttgtatacataataaataaataaatcttaaaaaaaaagaaatgaaaacaatgtggtttctgtttaagaaaatatgtatttatgcaacacaaataataataattaggcaaaataatatgcctacagattttttttgttactgttttgttttgagacagtgtcaactatttagagaagattgctcttaaatgtattactaatatccttttgcctttacccccttagttctggtattacagtcatggcttcccatgcccatctataaggatggtttaaaaaataaaatcggggctcagtggataaaggtatttgctgcccagcttaatgacctgagttgggtttttagggcctacatgatggatagagagactctgtctgtctgtcctctcacttctgtgtatatacatgtgtatgaatgggcacatacacagacacaaagaataaaatattacacatacacagacacaaaaatttaaatagtcaaaaataggtcaactgaatattttattgtttaattctcggatgacatgcaaagattgctgtgagttcctggctagtctagtttacatattgagtttctggctaacccatatcaacctctgccccagataaaataaaaattgtaaaccaaggagatattcctacttcaataagttatccaaagatttctggaagaccatccagtgaaagaaatgggttcattagagaatctttcagcatagttttcttattaattaaaaattatatatgtatatggttgttttacctgcatatatatctgtgtatcacttgtgtgcctggtgcccttggcggccagaagagggcagcagagttccctggaactggaattacaaactgttggggagggagcataaaccttgttttaagttggaattattagttgaccctgctttttcctcttttttccctaagctgtacagacctcttgacacttcttgagctcagcctggtaacttccctattatactcttatgtttggttctttgtttattgaataattaaactgtttgttgaataaagtatcttaaggtttgtagagtattttataaaggtaacacaatttaacattttgactgagactattactgttgtaatactgcgcttattaacagctgctaagtgaatcagctgtgctttcagaagttgtctagtctgtactctgtttagaattaaagcaatgatttcacagacaaatgtaaagaatgtttgtaaagttataatacttaaactaaaaaggcctagttttcaatagatcagtagttaatacatgtgagtaagacaaggaatagtgtctttctggttagaaatgtacaaatgaaactttcaaagtgaaaatatagagacacatctagggaataaaatggtgcttgaggccattggtaattattttactgaaaatctttgtccatgcttgttgatgcagatgcctttttaaaattatatattttttataaagattgatttattatgtatacagtgttctgcttacatgtatatatgcctgcacactggaagaaggcaccatttctcattacagatggttgtgagccaccatatggttgctggggattaaactcaggacctctggaagagcagccagtgctcttaacctctgagccatctctccaacccaaaattaatgtttttttttttttaaaagatttattatgtgtacaacattctgcttccatgtatatctgcacaccagaagagggcaccaggtctcattacagatggttgtgagccaccatgtggttgctgggaattgaactcaggacctctggaagagcagtcagtgttcttaacctctgagccatctctccagccccaaaattaatattttatatgatatttttataaggtcaagcaataaaatgtttcttaaagttgtctataattacagataatgaacatttcttaaggaatttttaggcttaaatgttgctgccttgctcttggaggcctagccagtggtggggtatttgcccagcccttagttcattgcctggcaccacaaaacaaaataacattctctataaagccagcagtgttgctcttgtttgttcagactccattagtttttcataccccttttcagaaagataacccccacatttcctggctttgttattctttgtattgttggactctatgagattaaaaacaaagcaaaatatttatttttatcattttaaaacatggggtatgtgtgaatatctgtgggcatgtgcacatttagtgttggcggcaggcaaccttggaggatgggcaggggtggatgtccagtcctctggtgttgcagtaacaggtggttgtaagctgtctgatgtggttgctgggagctgaactctggtcctctgaaagaataaatagcaagtgctcttaactgctgagacatctccagcccctttgcacaatgttattttgacattacgccatgaaatattttctctggaaactctcaaaccaatgcattccatatatatatatataaagtgtcatatacacacacacacacacatatatatatatatatatatttttttttttttttttttgagacagggtttctccatatagttttggctggcttgacctcacagatccatctccctttgccttccaagtggtggaatgttaagtttttttttttctcctctccctttttcaaatgtattttatttgaacattaatattttgcctgtatgtatgtcagtgtactatgttcatgcttagtacctgcagaagtcagaagagggttccagatcccctgggactggagttattgttttatgaaatgcctgtggaggccagaagagggatctgatcccctagaactggagttacagttgtgaggcattatgtaagttctgggaattgaacctgggtccttttaataagagcaacaagtgtttttaaccattgagccatctctcctgtccccacaaatttgattattttgagacagtgtctttttcttctttttttttggggggggggcatgtttgagtcagggtttcactgagtagccctggctgttcttgagcttgctctgtataccaggctggcctacttttacctgccaagttctgggattaatgatgtgagccaccacacccagcctgagacagtgtcttattcaccctaggttggtcttgaattctctgtagcagaggccagccttaatctcttgattccattcatgtacctcctgagtgctggtattataggcatgtacttccactctcatttctggttttgtgtggtgctggggatcaaatgcaaagcttcacgcatgatagataaagtggtctagtgagctagctacatttccacttcatatttgctctttgtgatggtatgtcaatatataacataactatagctctttgtcctccttcctggcaccaactgtgtgtgtgtgtgtgtgtgtatacatacatacacatattacacaagcacatttattttaaagatttgtttatttattatatatagagagttctgcctgtaggccagaagagggcaccagatctcattacatgtggttgctgagaattgaacccaggatctctgcaagtactcttaacctctgagccatctctccaggccccaccatgtgtatttttgtaataattctcatcttgttgccatcgaggagctacatgtgatctattattttacccagttaaaattgtttcctcttttgtttccctttttcttctcggtgagacattgactgtagctcagccagggctcatctcttttagcacttataatacctgtttgtccttttttgtttgtttgttttcttcagagatatttccatatactaaactcccacctctagctccctctccctcataaaaaatggataagttagcttggcagtggtggtgcatacctttaatcccaggactacggaagcagaggccagtagatctctgattttgaggccagcctggtctacaaagtattgtttcaggacannnnnnnnnncacacccacacacacacacacacacacacacacacacacacacacacacacggtaagtgctgggatttgaactcaggtcttcatagttgtgcaataatcactttaatgatccatccatctgtctaacaatctttctcccagtcaggctcttaactccaactatcacttctgtctctgtttttcttttcacttcattatctttgcacttgtagagtccctttactcagtcttcaagtattaaatagccgaagtatttcatatttcatatttcaggtcagtgagatggcttatcatgtagagacacttgatatcaagcctgaggacctgaattttattgtcataacctgaatagtgaaagtagagagaattgaatcccacaagtcctcccgtgtgctgttggattctgacttccagacagacagatatatacacacaaaatcaactagtaagttaaagaaaaacgaaactctgtataccttgcttccttattaaggctacttctgtaatagtccaggttcctgttgcctcattgttggatgtttaaaaagcttactcagtgcctagcagggacatcgtgataaatgtgttttctgctgtatatattcagttttgagtcattaacacagttgggtctggcatgatagcacagacttgagttacaggatcctatctatcagtgaaatagaagttctgtttttggttttgtaattactaaagataagaacttttttgttttctagaaagactgataattgttgaccagatagatcattgttagccctaccttgtttaactgtttggtaactgtttggtgttattctcaagatgccatgcatattttttgtttgtttgttttgttttttgtttttcaattcagagtttctctgtagctttggaggctgtcctggaactagctcttctagaccaggctggtctcgaactcacagcctcccgagtgctgggattaaaggtgtgcgccaccacccggccatatgctatgcatatttgaagggtgttttttagggtccatttttctgtttatacataaacataatttatatcttcaaacatgaaattagatcatgtcatattgtttagttttttttttgcctaatttccttgctgttgactttaccccttgttagtgtttagagaaagtgctatgaacagatatccttggattctttgtttttgtctttgagacagggtttttgtatgaagccctggctgttctggaactcactacatagatcagtctggcctcaagcacacagagagctacctacttctattgtgatcaaagggatgtgtcatgcttggctttttttttttttttttttttttttttttttaaaaaatttttccattgtacatttaaaaactccaatgtagctttggaaccatcctggatttcactctgtaaaccaggctggtcttgaacccagagatccacctgcctctgcctcagtcactgggattaaaggtgtgtgccgtcacctaacctttttttttttttttttttttttttttttttttattgggtttttttttttttctagatagggtttctctgtgtatccttggctggcctggaactcagaggtcctcctgagtgctgggatcaaaggtgtgcgccaccagcacctggcttgataatttttttgtctattgataaagtatgcctatttatgtctttgtttttgatgttactacagtcctggtttggatagagttagaaaagtgtctcctgtcaattttcagagtttgtgaattaggattaattagagaaactgactatgcttttactttgttttcatgatctatttactcattcattcattgagtcttactctgtaaaccaggctggggtcaccatggcccaggtagccctcaaacacattgtaatcctcctgcctcctgcctcggtctcatgagtgctagggattataggtgtgatccaccatgccctacttttctgggaagttttgatgacagtttagttagttaacctattttgagtctccctttttagtagatgatgctccccaccccattcttttttatgtttgtatgatgtgatgtgggcggcacaagacaaaatgtggatatgtaggacatctttgcgtgtccgtcccctttctggctagctggcccttgaacttcctaagcagttttcccatcacatcctttggtagacgtgttgggattatagattcacactattgcatcctgaccatttatgtacattccaggattttttattttgtctaggctatctaatttggtggcacatacttgttctaggtttccttttataatccttcaagtttcgtttttattgttaatttgtttgaggtgaggtctcactgtcttgctaggctgtcttccctcccctttttcagcaccgggattttaggggtgtgttgccatgccttgacatctctctaatgttcctttctcttttacttctaagattactactcttaaatcttgtctctttgtttgtggctgagtattttatctattattgacacacctgactgcctccctccctccctcccaatttgagtcaactgttgagcaagtagtagtactgtacctagctagctcagtagaatcgtaactacctacctaccttgctagagaccctggcttctgtctccaggaccaccaaaaaaacccacaattccccaccccccacccctctacagagtcttactttgtaactcagttgatctggaagttcttacacagtctggggtagctttcaacttgaccagctcctccaactcagtctcactagtgagtatgagtaagtagacccagttgtgaattaaatttaacgtgatcaacatgattgacatcccccttttttctttttccttttcttttctttctttcttttttttttctttttctttttttttttttttttctttttggagacagggtttctctgtatggctttggagcctatcctgacactcgctctgtagaccagggtttctttgtgtagctttggctgtcctagaactcactctgtagaccatgctggccccaactcacagagatctgcatgcctctgcctcctgagtactgggattaaaggtgtgcaccaccaatgcctggctttttttaaatttaaggagtgaatgctttcttctgtttttgtttgtttagttttgagatggggttttcatagcttcagtggctgggattcctgatcctcttgccctgagtgttgagattacagactagcactgccatcgtggctaattaactacccgtgtgtattttaaaagtgtgtgtgtgtgtgagagagagagagagagacagagagagacagagagacagagacagggagagaatgtgcgtgcatgaaggcatataagcttgcatgtgcatacgcataaaggcaagcatgtcatggtgtgaatatggaggttagaggtcaactttgtagagttgttctcttcttttcaagtgtatattagcgttctgggtattgaatttaggttactaggctcatgtaaccatacctttacctgctgagacatagtgctagcccattccctttggtgggtttctacttgttttgtttgagacagggtttcactgtgtagcttttactatgtgaacctcactatgtagaccaagctgttctcacaaaggtctgcctgcctctgtctcctcagtggaaggagtataagcctgtgtttccatgttcatctttttctattggttctgagtattgacctaaggtcctcttgcttgcacaagtacttttaccaaataagctgtcttctctgccccatgacaatctctaaaattttattttcatttatatgtatgaatttttttgtgcttttgtttttttcaatttgtgtgtgtgtaccatgtgtgcctggtactacagagaccagaaggagctattgattgggtttcttgaaactggagttactgatggttgtgagctgctttgtgggtgttggaaactgaacctgggtattcttcaagagtaaccattggtcttaatctcttgagtcatctctccagttcccatctcctaccccactttaaagtgaaagtgatatacaatgctacgaaaagcagtggaaggtgctgtattaatgaaacaggacagactattcctgtggaattttagcatctggaccactcatggctttgtctcactcagaagtgactctcatccagattcaatgtaacatgaaggctccatttcagaggctgtacttccttttggcacttaacatgttgttgagcctttgtctacagtagtgggacttctcagttgatggtggatccagggaatggctatctggtgtgcagtatgaataaatgaaagtgtatttggtccttgtgtatactggaagagattgcattaacattgtcaacaagtatgggcattgagtttctgtacagacatctttctgggtgtaatgcagtagtgtttggcagcatgaatagattgggaggacaagactagcttttagattggatataataggctgcagctgctggaattcttattacccacctacaggaaatggaaaggccttgtgaaaggtgctttatgatgcagaacttgccagttcccccatgcatcttgattaaggttccttgtaatgagtgaaatatgtagtaaaagctgaatggagttgggctgtagttcagttggtacagtgcctgcttagcatgcctaagacctagtatcacataaattgagcatggcgacacaagcttgtcatctaactgggaggtagaatcggaaagtcagaagtgtaagattgtctttgactataaagttagagccgagatttttttttttgtttttttgttttttttgagacattgctttggaggtgtcctggaactaggctggcctcagactcacagagagcgcctgcctctgtctcctgagtgatggggttaaaggcgtgagccaccactgcccagcctttatgagattcttaaaataaacctaagaaaagctttgattgctgtattgactgagaatgtgtcttattctgtcacttaggctggctcctgaacttgtgatcctcttgcttctttctcctcagtcgtggttttacagcacagtgccacacttgaccacatatttaggtttttaaatgtgttcaggagttaatgcagactttagttgagaatgctaatctagccaggcatggtggtgcacaatcccagcgctgggaagcagaggcacagggatctataagagttccaaagccagcctgctctgcttggtgagttccaggctgtccaggaatacacagtgagacaatgtctcaagaaaaaaaaaaaaaaaaaaaaaaaaaaaaaaaaaaaaaaaannnnnnnnnnaacaatggtaatttagggctagtggggagggctcaggtgcttctgacaaatctcacctgagtttatttaccaagactcacatgttggaaggagagaaacaatctccacatgggtgccataggctgccttctcctaaataaacaaacatttagttggccatggtgtttcacacctatagatctggcattctaaaggctgaggcatatgagaattatcttaaatttgaggtcagtctaggttatgtagtgacttccagtccaggctgagctacataataagactgccccaaaatcaactgtgacaacagcaacccaaaaaatagcaacaaaaattctccttccagacagtaaactggacctggaatgatggctcagcattgtacttgctgtataatcttgaggactggtttttggattccagcacccatgtaacatgctggcactcctgggcacaccaggtaaccccagctctgagggacagaggcaggagctttggtgttttcctggcttcctttaaccaaggagacatgggccccacccaggttgtgagagattaactcctcctctggcttgttcatgccacacacctacactgtgcatgcacaagagcagtcaaacagacagtaactgaagaaatgaacatttaaagtaatgctagctttactaaaaacttgtgtagagatatgacagaaagtttaatctcttttacataatttacttgttggcctaatcctggtatttttctcaaggattttggtttttcgagacagggtttcttgtgtagctttggctgtcttgggtttctgtagaccatgttggcctcgaacacacacagaaccacctacttctacctctctgagtgctgggattaaaggtgtgtatcaccactgccctgctatttttctaaaatttaagatactgtataggagccaagcatagtgttgcatatgcctgtatgtaatctcttgactttgtaaattaaggatggagaaagaagagtttaagactgggctatgtagcaagatagctcaagaaagaaaataaggaaaatccagttaggcttagtggcacaatcctgtaataacagctactcagggcctaacaggagttcaaaggccttcttcattacagagtgagttcacagccaacctagggtatctgctttactatctatctatctagagatagccctggctgtcctggaattccttaagtaggcctctaacatcttatttacacagttctcctgcttctgtctctagagtgctgggattaaagtgggaaaggcatgtcctaccaggtctggcttcagtgtaggcaagacttggtctcaaaacaacaaaatgtaaaatggattgagagggatatatatatggtacagtgcttgctagcatgtgtgaggtcctagattcaatttctgttacaataaaaacaaaacacgaaagcaaaacatcaaaccaataccacaaactccaaatgagcatttaatagtgtgtcactgcacaatgctactaatatttaattgttataaataatacagaaggaaaccttaaaattttactagtccattttctcttttttttttctttttttcaagacagggcttctctgtgttgccttggctgtcctggaaccctctctgtagaccaggctggccttgaatttattgattaaaggtgcacaacaccatgcccagcccagaagtctgtttcccatctcccccctcctcccgttccctccctccctcaactcagggtgtcttcaaattctcctgaagaaaaagatacccttaatcctcttgcctctgcctctcaggtgctgggattatgaatgtgtgctcaccacacttggttaatcagtgtttctcaaagtaatacttagtgattgagagttctgtttgactgttgccttctaacatctgtgttagtattttagctgctgaaatccactgctttttttttttttttttttcttcctaggcaacagctgaacagatgcggctcgcacaagtgatctttgataagaatgattcagatttcgaagctaaagttaagcaggtatgtttctaggaaagtatgctatgactgtgtactttattttttagttaaaatattctgtggggctggagagatggctcagggttaagaacactgactgctcttccagaggacccactttcaattcccagcacccacatggcagctcacaactgtctgtaactccagttcctggagatctgacatcctcacagacattcatgaagacaaagcagcaatgcacacaaaataaacgtttgttttgtttgttttgtttctctgtaacaacagctctgactgtcctgggactcactttgtaaaccaggttggcctctgcctccctagtcctgggattaaaggtgtccaccaccaccacccagccgaaaaataaattatttaaaagaaatattttctttatgaattaatgtgttttgcctacattatgtatgtgcactgcatgcattcttgttatccagctataatgcatgcttaagttttcagatacaatactatgtctaggagagtagcttgtgtggggtgtaactaataagtttgtatgtgggatattctaatgcaattcatgaatggtggccatgtacaagtgaagtcccagttaatgttttaggaatcaaaactttgcaagttctatgctattgacctaagtttaaacatgatctaggagttctgagaatgttgtctgtgcatatgttgtgctgactagtaggctgggggttgtggtgcacacctttaatcccagcactagggagacggagataggctgatcactgtgtgtttgaggccagcctggtctatgtagcaaattgttccaggccagttgatttgtgggtgagtctactagttttattggggagtatgggaaagtcagcctgcacttagagcctagacttactggagtctaggaaaagctctcatgtgggaggacagcatgatgctgtatttgaatagaagaatcagcaaagttaatattgaatgccactttttggttccctttaatcatcttctgatactttgatagcttatggaagtgacaggaaaaaatcaggacgaaagcatagtggcccttcacgactgtaatggagatgtgaacaaagctatcaatgtgcttctagaaggagactcggacacagtaagtgttatttttcctcagtttcaccttgtatggaagttgttgtagaggggtcggggcgtgctgtgttttggagggggtgttctgggaaataaacctaggttcattcatatgtgagacaagcactacaggaaagttccagtaacttggtattccttcagcaaaacagtttctactaccctggcccttggacatgaacatcaacctaaattaccccagctcttggtactaacaccccctaaagtgccccagcttaaagtgctctggtttgtggatattaacaccacctagagtaccctggcctatggacattaacattgcctagaggaccctgtcctgtgtacactaacaccacctagagaaccccagcctttgggtactaacaccagctgaaaacccggctgcagactgctcacagtttctcatctcagttaccacctctaacctcctcccaccccctcattggtttttttacttttgctcaggatagtctcaaacttactctgaggatgacatggaaattcttaactgcctgcctcctcttcctttgtgctaggattagaggatccaccacaagactggggattaaaatggtgtgtgtgtgtgtgtgtgtgtgtgttatatgtgtttatgtatgtgtgtatgtacaccaggtaagtgataccctaggaatagagttttgggtttttataaactgccatgtacgtgctaggaactgaatccagattatctgcaaaaccaacttttttttttgagggggggttgttttgagacagggtttctctgtggctttggaggctgtcctggaactagttcttgtagaccagactggtcttgaactcagagatcctctgcctctgcctcccgagttctgggtaacaagtaacaagtacttttaaccactgagctatctctccagccccttctgacctactcacaactttagactaacagaaaaccagggtttgctgataacttctttattaatggatattccataagcatcttctcatgaggcttaaaatacagacacttataataatcacacagagaaaactgtaaaaggcggttatgaactttattccctttatctctatgttgaaattggattgtatttggtttgtatttctaaattgaggaacctatttcagggcaagttaaaacaaataatacttcacctaaaagaaagtttattgatgattgtacccaaaatgattttcttggttacagagttggcttggtggttaagaaacctgagttcagtttctagaaccctcctgtgttagttcacagtggcctgtaggtccagctctccttttctgaatgcatttacgtacacatgcacacatgcacaaaagcctgactttgttttaaaagatttatgtattttattctatgtgtataggtgttatctttgtatgtgtatatatgcactacttgcttgcctggtgcctgtgaaggccagaagtgggtgtcagatcctatgggactggagttatatactgttatgagctactactgctaggaatcagacagtacccttaggctgagctgtctctccagcccctatacacacatagttttaaaacaaatacatatagaaatatgtatatatttctttttgtcctttttgagatttgtttttagttttattgtgcacgcatgtgtgtgtgcgctcatgtgtgcgcacgcatccctacaaaggtctcagttgtcagattccctcagagctggatttacaggcagctggagccacccaatgtgggtgctgggaattgagccgtccctccaagttttgtctttttcaggaaagtagaactaaatataaaagaattaaaatgtagggtttgaaaggtgtatgacattgatgactgtagaactctttttgatagacatcatgggagactgtaggggggaagaagaagaattttggaaaagaaagctcagaaaacaaagaaaacagagagaagagaactgagagagaagcaagtcgtggacggggaagcagcaaccgaaaaggaagaggtggcaacagaggcagagagtgtgagtacagcttttctgcttagcatttccataccctcagagagctgaaaggacagcccagagaaagcccatgaatccatctgtacgtgtaaatttcctactgtaatcactaacagtggtctgttaggtgctgtgatggggtttcctgtgagtgctggcctgggctacaggtagttagttcattttttgcatcctttaagactggtttctggtctgggcagtagtagccatgcttttgatcccagaacttgggaggcagaggcatgaggatctctgagcctggtctacaaagctacacagaggaaactctgtccatgcaaaaccaaaccaaccaaccatccaaccaaataaaacaaaactggtttctgttagagatcaagtgaactggggttggagtgggtataggttcattcactgataaatgaactatttttttcttccccagttacagacactcatagtatagacgtggatcaaattaataataggtatgcctttaatcctaagcagagtcatatggatctttgtgtttgaagccatcctggtatacatcgtaagtcccagaccagccagggttatatagtgagacactgtctcccccctcaaacaaaacaaacaaacaaacaaaaacctaaaggagataaatttaataggcagggctttttatttagtttaacctccatttaaaaatagaactggtaaaaatagggctcagtaggtaaaggtacctgccatgcctgatgacctgagttcaatcccaggaaccatgtaggtagaaggcgagaaggggacaacccaaagttattgtccaagctccgcaatgtgtgccatggcatgtttcctgtggatccatattttgacaccattttacttggaacagcccaggagacattttataattagtttattccattgactgcttgtgtcgtgtggagacctatggtactgagaaaaacagatttttttaaaaagttgatagcctggtgatgcaccttatcctagaatttgagagcttttagtagggaaattgaattcagggcccagcctgaattcatagtgaattcctgtctcaatgcccctcccccctttttttcctagttctcataaaaataattagtttaagtaaattctccttcctccagcagtgaaattacagacacccatcactatgccttgctctaaatttttgtttttggcattaagtaaactcctcctcctcttctttagattggttccactatgtagaccaggctggccttgaattcacagagatttacctgcctctctctgtctcttgtgttgggattaaaggcatgcactaccactgaccatcagcctggttttaaatttgatttaaaaattacttttaatctatttattgtttttttgtggatacatatgccatggcacacatggaggtcaggaaacaccttcaggttgtcctctctctccttctaacatgtgggtcctggggttgaactcaggtcttcaggcttggcaggtgcctttacctattcagctatttcaccagccttatgtttttattttcctgtatttatttatttatttgtttttgtttttggagacagggtttctctgtggctttggaggctgttctggaactaggtcttgtagaccaagctggtctcaaactcagagatctgccagcctctacctcccgggtgctgtgattaaaggcgtgcactgccaccagccttatttttatgtgaaggttaattgagtggtagcattaagaatgagaagtatttatgcaatagaaatgtagaatttggtgatggggattgaatcaaagcccttagcttgaactcttctttagccacatctctatgtcttatatattactttattttattttactttttgactacatgactttactcatgtagccctgactggcctttgactcacagagctttgctagcccctgatacccaagttctgggattaaatgtatcatacctggccttatatgatactttaataatgtcacatagaacatgttatgtggggaaatacattcagaaagaggtggagattatgggaagggatatggtaaatttaaatgtactgcaaaggaagcctcactgggagctcatgtgagttaagtagcagctagagtgaagagagttaatgatgccaaaatctcttgtcaggttattttttttttatgtgcaaccatttaagccagtatgaatatgaaaaatgaaaaacagtagtctttgcttgcctctttctgggtagtaccttttttaaaaaaatttttttttaatttgaattagaaagattttcatgtcaatcccagttctttcccctcccctcttcccctgccccccccaactaataccctacctatcccaaatcctttctgctccccagggagggtgagggcttccgtagggggtcttcagagtctgtcatatcctttgggatactgcctgggggcaggggtctaggctcagggagtatccctcccaaagtccattcctatgctagggataagtactgatccactacaaggggccccatagatttccgaggtctcctcactgacacccacattcaggggttctggatcagttccatgctggtttcccagctgtcagtctggggaccaagagctnnnnnnnnnnnnnnnnnnnnnnnnnnnnnagacccgagctaacatggggttagctcgttaaacaacaataaagcctcatgcagtttgcatcaagtttctgcctccgcatggtgattggggtggccgctgttctgggctgagatcctggaggcctgagcttctgggggtcttgcaatataagtcagtcatcaatctcattatcggggaagagcatttaaggttgcttagattgttagttggtgtcatctttgtagctctccagacatttccctagtgcctgatttctctttaaacctataatgtctccctctatctgggtactaccttaaagaacctgtctctttgacattaccttttacaatgacactgcgtgtgtgcctgtgtttgctacgtgatattactgatttaaacacttttacagcctttaattaagaaataaattttgtgatgtgtaacatcgttgcataatgcgtgtttgttttgttcttactgtttaaaaaaatgtattttagataagggcacatccatgcagagaaagtaaaattactatgttatctattggatgtcttgttgctctatatgtagaccaggctggcctcacagagatcctgtttctatcccgagtgccgtcattaaaggcatgttccaccatgtccagcaccgtcttattttaatttaatttgtatatctgtgatatctggcatgtgttgccattcattttttttgtggacaccccccacctctctccgccctttgagactaagtctcactatgttatccaactggccttgaacttacgattctctttgttccaccatcctaatgatgaaagtgtttggtcttatgcttccagttttgtggtactttgtacttttttttttttttttttttaaagtatacagtattctgcctgcatgtgtccttcaggccagaagagggcaccagatcttattcaaggtggttgtgagccaccatgtggttgccgggaattgaactcaggacctttggaacaacagccagtgctcctaacctctgagccatccatctctccagccccttttcctagtttctaaatgttgtttacatcctaacctgctgttggagacacagtctcccttgtagaccaggctggccttcaacttgtgtgatcagaggagagtgcaaccatgcttcacatttttaactttttggtcattatgtgtttggttttgttaagtttaagtgcctgagaagtttggtacaaaggtttggaaatgaaaagttggcatttctgctttttcctctttagtcaagggtgaggagaatggaattgatagcaaccaaggagacaaaccttcagagcgaggcaagaggggccgaggcagaggtaagggagaatgatccaaatagaatgctgggcacgttattgttttgttttgttgtttgtttttttttttttttaattttactttggttctgttattttggtgttgaagattgagcccagtgcctatcctggataagaatgtgctccgctgctgagctacactccagaccctggcatcctattgcttattgcctcttggattctgaaaaccacttttatagtcaggtgtggtgggagtcaggcaggggctggagagttctagtatacatagactgtcaacaaagcaagaacagcttattctttattttgggcttttgtggagttttgcttgtttgtttttgttgtttctagacagggtttctctgtccacccctggctgtcctggatatgtagaccaggcttgaactcagatacacctgtctctgcccctccctctcaggttctgggattaaaccaccactgggcaatatttatttacaatgttttatgtgtatggatattttgcctgcatatatgtccatgtgctatgtgtatgcaggcctgtggatcccagaagagggctatggatgttcctggggactggtgtacagtggttgtgagctgccatgtgggagctggggatggaacacaggtcctttgaccagtgcccctaaccactggacccctctgtctagcacttgtcatttttactttttggtttttcgagactgggtttctctgtattaattgttctggctgtcctggaactcactgtttagagcagactggccttgaacttactgatctgcctgcctctatgtggattaaagtgccaacaataaaggggtgtttttgttttgttttgttttttaaagagtctcatactatagtctaggttggtttggaagtcactatgtagcccagattggcctgaaactctgcttgattaaatcattcaacaatatatacatatacaaatactactgtattccacaattgtgttttctaaaggatttggacgtggcagaggcagaggggcaggaaggttctctgctcaaagcatggggtaagtcacagccatcctattgttgtagttatttcctagttattctacttttctctccctccgacctgtctacaacttattgatcacacttagagcattaatgttgccagagatattaagtcagggttctaacctttgcactgctggcagttttacttggataatgctttattgggatgatagatttcctgcacaacctttcagtataacccctcacctccatgaagtcattaaaatgtctgcagacaactgccaaatgtcccctagggtagggatcaggcatatgtgcataattatcctgagttgccgagttgaaagccagctaaatccagccattgtacacaaaatatgttcttgtaaaaataatacttttatcctgagtgatagtagtaaaggctgactgttctaagtaggtgttacaattgactactattgtttctaggtttactctttctccttgtttttttgtgtgtggcaagacaactcagatattgagccctaaactttaaattggtagcttttatgtttacttcaaattcttctgtgtatattggaacattggtacttattttgttcttcgttaatcacctgatcatgatgccttggggatgttctgttagaacataattattttttacatttttatgtgtatatactgacatatatgctgtgtatttgtgaacatatgcatggcgtccgtatggagtcagaggataacttttgaaagtcatcctgtccttccaccatttgtgtcccataatagaatttagcttgccagtcttggcagctggtgccatctcaccagcccttcagttaggattgtttttgtttttttaaaccaaggcttttctttttttttttttctttaagatttttatttattatgtaaacaacattctgcttccatgtatatctgcacaccagaagagggcaccagatctcataacagatggttgggagccaccatgtggttgctgggaattgaactcaggacctctggaagagcagtcagtgctcttaacttctgagccatctctccagccccttcagttaggattgtcatgcaaatatagagaagtgatgaacaaaacatagctatagctgtacacgaagaagaatataattccattcaaagctaggttgggggtattggtgaaatggttcagtggttttcttggagaggccttgtgtttggttctagtaccccggtaccacattgtgcctcacaaccctttgaaccctagtttcaggggatctgatgcactcttctggcctccatgggcagggagcatgcgcatggtgcatatatgtgcatgtaggtgaaacacttgtacacataaaataaaaatgatggcacagacccatccttaatcctcagcacaccaaggcataggcagacagatctaagtctgtaagttcaaagtccccttagtctacatagcaagttctgggacagccacgtgacattgagagaccttatttcagaaaactgacctccccaaataaacctgccaagcttagagtccgacacaaggaaaaagagatgtattaactgttgatattactgctcattggagtttttttgtttttgtttttgttttttaaccattctaagaggtttattagtaaagagtgggaaatggagaggagggagtaggtacaggcctgtctggaagaaatacagggagagagagaaattggacggtttttaaaagatgatttttgtgtgagccttgagtattttatttgtgtaccatgtgcaggaaggtgcctgtgagacctgaagatgttttcctaggtactggagttcgcaggtcaatttgagttgttatgtgggtgctgggtattgaacctgctgccaagtcctacaaggagcagcaagtgcttttaaccactgagccatctctctaacaccttccttgacaatttttttcctggtgttctttcttggctggaaaagcttccaggtctcctaacttcttaggatgccaaggatcaaactgttgaaacctgagagccatttctacaggagtagatatagggtccagaagtagccatttctttgttagaagatatgcatgcttggctggagatgtagttggtttagtgccttcccagaaagccctgggttcagtccccatcatatcataaagctggacatgctggtacaaacttgtatttttatgaggtatccaccaaagaagattactcagacatgtgttcaagccaacagaaagtctttattagctagccagcaactactctaggtatttgagacaccttgcagccctgcgccttttcttaggttgagcttttttaagcataaaaaaacacatcctctcttggcatacatcagttagccagaagtggaaccacagaaagccaaaatcaaggtttgatggattagatcttattcttgttttggcaggtgttgcctatgtgctgggttccaaggcttgaatggtacttctattatggtatcatttgttttaaggtctgggggcctgttaacagtatcagaagttcaaggttgtcctcaattacagagtgagtttataggcaacctgggatacatgaggcagattctgtcttcaaaaatgataaaaaggagtggagcctcatgtctttagtcctactacttaggaggcagaggtaggttgagtcttgccagcactacatatccatagtgagaccctgtctcagaaacaaaattaaaacattcacatcattgggcctaacaggtaaaggtgcttgttgctaagacttgtgactaagtcctgtctctgagacccttatggtggaaggaaagaacctgctccccataagtatgcgatagcatgtgtgtgtgcccacacactaaataacagataaaaaaatctgtatcaggctgtttgtgttggcataagcctttaattccagcatttgagaggtaggcagatttctgtgagttcaaggctaccctagtttacttactcagttccaggacagccaaggctacattacaagactgtctcaaaacaaacaaaatcttcattataggggttggagagatggtttagcagttaaaaccactggttgcttatccagaggtacctgggtttgattcccagcacccaccagcagcagctcataaacatctgtaactctattttacagaagtcctggcctcttctgatttaaatgaaatccccattttctggcctctcagggcacttcaagtaggtggtgcatagataaaacacccatacacataaagttaaaaaaaaaaaaagtgtttaaagaagcaacatcacaatggcttaaaagttagctgtcatcaatcaaatggtaggagggagaagccttttacagcagccctttgaaggaacttgagcttatttggtttggatttttttttttttttcctctttttgtttttagagacagagcctttcaatgtttctttggctgtcctgatgcttacttttgcctccccagtgctgaactaaaggtttttcgagacagggtttctctgtgtaacagccctggctgtcctggaactcgctctggagaccaggctggccttgaacttctagagactcacctgcctttgtctcctaagtgctgggattaaaggagtgtgccaccaatgcccatcaaaatttttttgtatgggaaattttgtacacagtgtttattttgtgattttgatgcttgctttagttgcctgtttgtttacttcaaaccccaggacatttaaccctgcagactattcagagtccgcatctacagatatcaatgggacaaagtcgggggtttgtgctcagaatggtacagatgagggcactggtaagtgttttgatttgtctgaagtctttgttttgttctatgtctgttcttgagaaatgatctcactatatagcctgagttggctttgaactttcgtggtcctcctgtctcatattcttgaactctgggatttcaagacttaacgatctaacctgtcttcaaagactttttttgagagagagagagacagagacagactgactgactgactgactgtgagtttaggtgcctgtagaggagagaagagggtgccacattcctcgaatttctgggaattgaatgcaggtcctctggaagaacaaacatccttaactgccgctagagatggttttaaaatgttttgttttatttgagtatgatggggcatgacctgtctgaagttcctgaatccaagttgggtatatgtgcttaaccactgagccatctctctagtcctgcctttactttaaaaatgtgatgaagtcctgttttctacctgactttgaaccttcttatcttcttatctcagctgctgaagtgctagaatcaggtgtgtgcaaccactttcagctaggagaagagtttaggattttttatgtttattggtgtttttcatgcatgtatgtttgtgggaccacacttgtcagtgcttgagtaggccagccattggatcccctggacaggtgttggtacactgacatttaggagcttgggattgtactcaggtcttccagaagaacaggaactactcttaactgtagagccatctttcagtccttaggagaaaattttactgaaagtgcttagtattctgggtggtaactgttaaaaccttaaaaaaaaaaatgcgtgcgggctttatctatctatctatctatctatctatctatctatctatctatttattggggggcagttactctgtataacagtcctggatgacctggagacccacctgcctctactcgagtgtgccagcagtgactagctatttatttattttggtgtttttgagatagggtttctctgtgtagcccttgcgctgtcctggaacttgctctgtagaccaggctgtcttagagctcagaccgacttgcttctgcttcttgagtagctgggattaaaggcatgtgccaccatgctcagctttttgtattgttttctgaaatatgtaagtaaatagttgttactgtttgtttacctggagatcttctggagatgagtttgtggtagtcttaactactgaagctatgtttatataaaaatataatttatgcaaaaattagccactaatgacccaaaataaggaataccaaactaattcttcctccacacctggaactttagttgagggctataattctcctggtaacatttggacagtttcatagagctcttgcagcagcacttccatgttttcctgctccaatctggtttatgtggtactgggattgaacccagtctttgcacctgtgaggcagacaatccaccaactgaggtacattcccattcccaaacagaacatggaaagcaattgtaataacctcataaaatgtgatgcgcagttgtttgtcgtacctaatgcctcttaacagtatttaagaagctgatacaggaggattatgtaaattctaggccaacctgggctgtagtaagatcttgtctcaaaaatcacatcaaacaaacaggaaatatccaatgctaagtaataaatctaatggtaacaacagattaacaaacttgtatctagaaaaatacttttaaaacaggtaaaattggaagtgacattatggactttaaaaaaaaagaaaaacttatgtaactgggcagtggtggtgcacacctttaatctcagcactcaagagtcagaggcagggagatctcttgagttcgaggccagcctggtctacaaagctacacagagaaaccctgcctttaaaaaaaagaaaagaaaaaaacccttatgtttgtgaatatttttccttgtatgtctgtgcatcattgcatgcctggtgcccacagaggtcaggtgagggcattggcccactggtactggagtcgcagctggttgtgagcaccaggtgggtacttagcattgaatcgacatcctctacaggaacaagtgcttttaactacggcatgaattttccagatctaaagaacattttttaaatcctgttataaatttgaatttttaactggctcccatctttgcatttagtaatctatagtgatccttcttgtaaatgtctagtatctttaacaagttgaattgaaaaatatgatttattgaactgggcatggtagcacacacctttaatctcagcacttgggaggcagaggcagaaagatctctaagttcaagagcagccagggcttgaaataccatatcaagagcagactccccccccaaaaaaaatcagatttatatagttcagttggtagaatgcttacacagaacccttagtttgatactagtattgtttaatctgggctgggcatagtggtatatgcctagaatcccactacttagatacaggcaggaagatcaagttcaaagttatgctaggctgcacagcaaattgaaggtgagcctggtcatgagacactgactcaagaacagatttattagtaagtaatttatttgtttttgaggggaggcacagtattttttaagtgttattttgagggtcttactctacagtcaggctagcctgaatgtagtgcaggctggcctggagctcatggagattctcctgcctcaactcctttagccctggatttatcattttcagctttattatttatcttactaacttgtttgcatgtatgtgtgtgagcaaatgggtgtattcatggagatgaaggagagcatgtgagtccattctgttcaccaagtggatactggtgattgaactcagggttataaaccttgacagcaagaacctttacctgctgagccatcttgctgacccattgagatctaatttacatacaatttctacaggcagaataagttgaattctaacatgcatacagaattgtaaccataattaaaattgagatggtgtttttctagtagcaataaataattacaaataaactaaaaatggatcataatttaaaagcttgtagcatcttttgtggctggggatgtagctcagaggtagggcacttctttccatgtgcaaggcccagggatgtatccctagtattgaagaagtaaaatgtacataatgtatgtgaaagatttgtttgtggagaaattcaacacagtttctaccaaaaggggcaacatgtttagtgttctggagttggagatatcattattgctgcaacctggttttctcctcaggatgataggtattgataggtagcttcagaatagattctacttcacatcttagcagtcttctgccttcatcctaaaaacacaatggaagagtatttacagtaagccaagcaattgtgatgaaacaaccaagaactcaagaacttaatctcaaattatagtaataggcagcatggaactagcagaagtgtatatggagagttgacaatgtacctagcggggatcatgagtcttctgtctagctgactagagcaaaaattttacaattcagggttgttcactacagtgaatacagcagagcaacggtccaagtgaggcttacatgtattcacaaagaaggcaggaatgaatattacttcaggataggcaaagataatctcagtaagcatgagtcattaagtgtgtgtgtgtgtgtgtgtgtgtgtgtgtgtgtgtgtgtggtgtggattcttgtgcccatgtgtataactctagaaaccagaactgggcagggcaccatgtgtcttttattgctctctaacttttattgctctctaccttcatgagtgggtatgaagaggtcagaagactttctaccagtaggttccaggaatgaactcaggacatcaggcttaacagcaagcacctttactttcttagccattttgctggctccaatagtttgatttgtaaatcaggcatagtaagacatttaacagttagaacttactaaatgaagtaaaaactataagtgttatatgaatgttcttgatgttttgttcctagaattttccatttaatgtttttgggccgtgggctctccctgaaggggactgctgtgtgatacattaactttatttcaagtgctgactttctcttgtttccatcattaaaagctttccttttgatccacagaagggatgggaaagcctcacagtatatctcaggagctgccaaataaaaggtcttatggactcaaaggtatgatggatgttttgttttgaaattttgcgtagataagaatccttcagaaccaagtatgccatccattggtagagtggtcccccagggtacttgagatcccaggtttgaccccagcactgcataaagtaggtgtggtaccgagtacaggtagtgcaaagtttgaggctagactcaaaagaagaaacctgtgagccagtcaagtaatgctaaaggcatgagttcccaatcctgatgagtttaatcctggggacccatagatggagagaattaacctttacaaattgtcccctgacctccacattcatgctgtgacacctataacccatcctactcccaccacaaaataaataaaactaataaaattttgaaaacttaaagttgctccattcctatacaaagtaacgggtttcagactgagtgtagtgctgcactctttgaatctcagcactctgaaggcagaggcagatagatttctgagttcaaggccagcctagtctacagagggagttccaggacagccaaagctgtgtgataagaccctgtctcagaaaactaaaacagaaagaaagggaggggaagaaggagtgtgagggagggaggaaaggaggaaggaaggagattcattgtgtcatttttatagaacaactgtgtatttactttgttcttacttatctcttccctatggctctaccttatactccttgcttctgggcttttagtttttgacctgggactgaagccagagcattgcatatactgtgcaaatacctcaccagtgaactataatcttagttagctcaaccatactgtttgaaactgaaaataatgttatcaaagttatcccatgtgttttggggtataggaccatagataggaaattgaatcatttgtatgaaattcttactgtgaagtttgaatgttctagaattaagagtctgagctcagtccagctgtggtagattctagcactcaagaggtctgtgagttttgaggccaacttagtctacaaagcgagttccagagccgttacacagagaacccttgtctcaaaaaactggggggaaaaaaagagtctgagttcacctatttccatagcatttttatactacagtgtgtatggcaggctattgcagcatgtgcctctggctttcctatgcttttcttcacacatcaattcatggtgctacatctttcctacctacaactatcattatgcatgatgtcttcctgcttagaaacaaactcattttctcacctgattatgcacagcttctttgtgttaattttaaaattatttccctgctcctctggacttagaacaggatgacagttacagtaatgacattgtgtgaacttggttggaaattgtgtaatgtagcaattatttttttttaccttgcttcctatatctgataatcgctaaagtcactggtacaggttttcattacaaaggtgttctaattatatgttcatgtgggtatatatgcacaaatacacatgcatgcggaggctgaaatcaaatttgggtgtcatttcttaggagccatgcctgttgtgttttgagatgggctctctcacttaggttggggccttcagtagtctaaactggcctgcctgtgagcctcagggattttcctgtcatcacctctcaaagatcaaacatgtatctgcctgtttccgaacaccaactttggcttgatcatgctcagcttttacatgagttactggaaattcaagctctgttctccatgctccattctctagtactcgtcttacctgttcccatagcccttgaattcctccccccgcttttttttaacattatgcgttctgagaattgatctcaagttcttatacttccacagtgagcacttcattgactgctaactcactaactcctatagtttattattatttttattttatgtatttatttacttattttttagggggtttctaggcagggtttctctgtggctttggaggctgtcctagaactagttcttgtagaccaggctggtctggaactcacagagatccgcctgcctctgcctcctgagtgctgggattacagacatgtgccaccacctccctgtttaatttattattattttattattattattccagtattgagaaattaaaccttgtgcatgctagacaagcactgtatggttaagctgtaacctgccctaatgatccattttattcttttttttttatttatttgtttattagtatgcttgcattttcttacagcagaattgctaaaatatttcttaaagtgcagtttgaggcattaattttattttagtgtatatagttctgggtatttttatagagaattcattttttatttttattaagaatagatttaaggaaataatttttcttggattggtaattactaattactaattagttgaattagtaattagttgaattagtaaaattactaatgagttgaattatttttcttgcataatacacaaactcattagtgttgaagtttctttccagctaggtcactttgctgtttttcagccccaaataagtacacagagatatattaatcatcaaactgttggccgatggctagggcttcttaaaactatgtatgtatctatgtatctctacatggctttatcttaccagagaacacttggcacgtcctatcttcccagtctctacatggcgtctacttcctctctctccttctcatgcctatacttcctgcctggccaatcagtgttttattcatcaaccaataagaaaaacatatatacagaaggacatcccccatcacattagtagtatggttgactgtactggacctttttttattccctgtcaggtgcctggaaaaattctgtggaagaatggacaacagaagattggactgaagacgtaagtgttcattcagacctttcttcctcctgctatgtcttagcatctctcagaaaaagcccagtgccatttatcttgtctaacctgctgctactgctactacgcttctttcccctcctcccccctcctcttctgcctctgtcccttgttctcaaagagttgccttttcaacacatggttctcaggttttttttattgttgtttgtttctttgttgatgttatatgtgggcctgaatgtcctggaattctagaccagactgatcaaactcatggagatccttctgcctctgcctctcaagtgaactctgaaatgttgaagctgctcacctaagtcataatttaaacactctgtaactccccccacttgccccctatgcgtttcactgtgtggccctgggtgtcttggaacttgctttatagaccaggctggccacttgcctctgcctcctgagtgctgtgattaaaggcttaagatactggctgttttttaaaatcttttatttggtggtggtgaaagaaccgagcattcaagtgttaggtcaagggcaaacttggtaattgctgtctcaggcacacatgtgcaggcaaatattcaaataaaataaaaaatgaatctaaagataataagcccgtggctttcaaataaagattactaatcaatgaaagagaaaagacatttttctttggagaaaaaaaatcatcaaacttttcaaagtttcctgcttttttagcacattcattgatcagtggtgtttcaagtggagtactaactaatacttgaaggttggccccctttgtgttaagttgttccttcacgtctactgatgtagttgcctttcttggggagggttagttacttggtggtttttgtatgagtcatttcctttagacaccctctaggtgataagaacactgctgcctgaaaagggctccagtcaaatatgctttgcatatgtattgtacagacaaaagtaaagttttttctgttgaactttccatacagctttctgaaaccaaagttttcactgcctcgtctgttccagcagagaaccacatcacccctgggcaaaggtaaagggtttttgtgtttttctttttatcttctttttcattcgaagcataattgaaactttgttttagggcaactatttccatcttttattctactcttacagtttctgttttattcctctaattagcctttatttccccttattgcagcactcataacttcattcacatgttatcagtcgtgtccaatgattattgaatgacacttgttcttgggatatgttagcagttggccagagagtatactaaacctagttataattcatagttactcttttaataaagttttgattttgcccttgaatttggggtcttactttgtagcccaggctggtctagagcttagagatcttcctgcctctgcctctggagttctggatgtatatcactattcccgcctaaaacagtttaaagactaaactttagtaccttatattctttagtttcttcatgcatttgtttagatggtctctaacctaattcaaacttgccattttaaatggacatgttattataatgtgccaaattccagcaaaagaaggcctttgaggttaaaattatttgtgtgtgtgtgtgtgtgcgcgtgtgcgtgcgtgcagttgtgtagaggctgtgttgtccttcagaagggctgtctaccctggggggaaaaaacattgttttacatttatgtatttttatgtgtctgagcttgcatgtattttggtgcaagagcatcatgcccatgtgccatagcacttttgtgtacgaggacatttccataggcttacagacgtggttcaccatggtaattctaaacacctttgataatggtgataagggtctgtgtgactggctcctgcagcttgttctctgaccttaatataagcatgcaaacacatatgtgcacacatgctctaaaggtatttaattttaaaattaaaaacattttaaatgctaaaaagtttaaagcctagatatgtgtgtatatatatatctttaagaagtacaagagagctgggcagtggtggctcatgcctttaatcccagcccacctttaatcccagcactcaggaagcagaggcaggtggatctctgtgagttcgagaccagcctggtctacaagagctagttccaggatagcctccaaagcaatacagtgaaaccctaaccaaaaaacaaaaaacaaaacaaaacaaaaaaggaagccctgaatcttcttctcaaaaccaagctaaatgagacagggctttattataggagagaaaaagttcatagatcttcgttgagtttataactaagtgaaaaatagctaatttactggtggtactttaatttctcaaaaaaaaaaaataataattgagagctggagaggtggatcagtgggtaagagcacccaggttagattctatcactaacatgtctggtcatcggtctccatacttccaattccaagggatctgctaccctcttctgatctccatgggtgccaggcataaacatggcacacagatacatatacatagaaatgaaacactcatatgtaaaataaatgaatatgagaaaaagataattgagttaggcatgatgttgaatgtctttaattttaatattcaggatggggaggtagaaggatcaggagttttaagcaaggctcacatataaagtaaacgggaagctaaccttgactacctgaaaccttatgtttcaggtggtagtgcatgcacacctttcattccaccacttagaaagtagagaccagaggatctctgtgagtttgagaccagcttgatctataaagcgagttccaagatagccagagctgtaaccagagaaaccctctcttaaaaaatgtaccaaacaaaaatcccaaccaaaatcgcataaataaaaaatgcttaaaacaaacaaaaagaagccgtcgtcttcacaaattttcaacacagctaatcagatggcaccagggactgcaaactccactgctgccagtgacgattatccttagccactcacttttatttcagtgcgatgtgtgtttgagtttgtttgtttgtttgtttgtgtttgcgtttgttttattccagtgcgatgtgtgtttgcatttctttgtttgtaataataggtcctcactttgtaaccctctggctgtgttggaacctatgtatgcaaggttggccttgaactcaaagatccaactgcatcagcctctcaattgctgggattaaaggtgtggctcaccaagtgtaatgtacttcattcagtatggggtcttcaggagtacgcccattagcaagtcatgaagaatttattgctcataaattcttgcagtaatagctggaagtagaagacggtctttatccaggaaacaatgatgtgatggtttccaagcacatatctgatgattctgtgtggagctcagctactgagtttcctgggccgagatcaaacttctttactcatcagtgagcaataactggaatgaaagatttcttcttattcattgtgtgtatgtgcattttattttcattttgggttgtaggtgtgatgtgccaccacacatgagtggaggtcaaaggagagtttttgagccttgcttgtctccttccaccatgtgggtccctgcagttgaaatcaagtttgtcaggctttggtggcaggtatctttacttgatctctaagccatctcactggtcaaaaacctgaactttttgtagttcttttatttatttttgagacaggttctctctacacagtctggctgtccagaaagtaactgtagaccagagagctgcctgcctctgtctcgtgagtgtaaagggtgtgtgtcaccacaccaggctgtagtgctttcccagaaaaccctccagtactgtttctcacttgagtcttactaaccttttgaaatagaatttgctttgattctggtggtgttgcaagttttattattagcactatatgtgctaatatataatacaaatagcacaactatttgtatcactggaattggaatatcatacattagaacaccaacttaggttttagattattagcctcaaaattgaaattggtttcaggatagtaaaaatggttctgtataaggaacttgggctaggatcttcctctgtatgatttaactactcagaccctgtctcactggcatgatgagagtttcagttaagagttgttaggagtaagcctttgaaaggactcatggagtaccattcctgggtaaaccttttacagctcccacttaactgggtaagtcattcatgttgtacacagcatttatcccaaacttcattcttcctgaggccatcaaattggaatatttggtgggcttttgggcagggtaataggggcattataagatcttcgttgaactgggcagtatggttttccattcctttacaggcagatttgggagttcgaggccaacctgttgtacagagcaagttctaggccagggtggtggtggcgcaacctttggtccaagcacttggaaggcagaggcaggcagatctctgtgagttcgagaccagcctggtctacaagagctagttccaggacagcctccaaagccacagagaaaccctgtttcgaacacctcctctcccccacccccaccaaacaaaagaaaaaagacttaagcttctactatggttggatgtgatgttttaacaatattgaatcactctgtttcaagaatattgaagcctgggggtggtgccacacacttttaatcctagcactaaggaggcagaggcagggtgaactcttgagttagaggccagccagatatacatagtgatactctgtctcaaagcaaacaaaaaccaaaaagttgaaaggaaaagataatcatgaacccaagtaatggtgtctttaagagccattgcagctcctctggggatatcatcggaatttctcagtgcccatttctaagtcggttcactcactggctttgtaacctgtttggtgactactcagcttctcttttattttctctgaaactccatttccccatggttttccttattcaatctctggcttaaatttcctttatattgatgtgctccccagtttgctggctggtgccacttgctcatgacagctgattgctcgtttgtctctcatctgcttagcattgacctggtggccttgctccagaagcctgtccctcccactcaagccgcagaagccaactcctttgaaacatcccagcagcagggctttggccaagcacttgtcttcacaaattctcaacacagcaatcagacggcacaagggtctggcagctccacttctgccaactcctattctcctcagagactggtaactcacttttatttcaagttggggtcttcaggaatgtgcccattagccacagtcatgaagaatgtatggctcttaccttgcagttatttcctcatgtaaaatgctggcagtagatctttgtccaggaaacaatgatgtgatggtttccaagcacatatctgatgattccgtgtagagctgagctactgagtttcctgggccaagatcagaactcctttatgagtcctggtcagtgagtgataactgggatgaaggtatccttagtaatgattttgttttttaaagattttatttattattatgtatacaacattctgcttccatgtatatttgcacaccagaagagggcaccagatggttgtgagccaccatgtggttgctgggaattgaactcaggaaccctggaaagccagtccgtgctcttaacctctgagccatttctccagcaccttagtaatgatttttaaacttcctgtttgttgtgggtgtgcctgcaggtatgcctgcacaccatgacccacttcaagaggtcagagacaacttgtaaaagtcagttctcactctccactctgtgggccatcttgtcagcccaactgattattttcccctggttttgtttgaaaatatgtttctgtatttagtatgttttaaaatttttgtttgcaaattgaataaaaagcagatgtttgtcttgtctgtccaggtgttcctactttgcacttttcttctattccataaaatatactcctttttcagctggacgttggtggtgcatgcctttagtcccagcacttgggaggcagaggcaggcagatctctgtgagttcgagaccagccaggtctacaagagctagttccaggacagcctccaaagccacagagaaaccctgtcttgaaaaacaaaaacaaacaaacaaaaattacactcctttttcttaaattgtcaagtattatatgacagagtccctttcgatatgttttccttgaaataatgtcacccgctgttaggcaggcacagtgactgttacttctgagtgccttcacagtgagttcccatcaggaagaattctgggattggtagtgaataagactgacaggtggggcaacaagcttggagtgtcaccagtgaaggaatttagtacaggaagacagctgaagtctgttgtaatgcaaagtaaatacagagaatctgccagtgtgctttcctctgcttttccatttgctaatgacatatttctgacatctatagtttctgtttggtcacggaggtcacagatgaagctggaccacactttagtgagagcaagttagtattaaattagggttgtggctctaaacgttactactatttataacccctggtgaaattaagtaacaatttaacaataataatatagtaaaaatgggttaacataagacagaatgaatcagaatctgtggtattattaggacttggactctgtacatatgctcatttgtgtcttactggttcagttaagtaggtgaaattgaaactatactaagtgttacagagagcaaatcagtggctgttgagaaaaagagtatttggtaatagtagctgctgggtggatggtggatgctgtgtcagtgagactagtgcttgagaaagatgggtttgagtggggcctcgatggcaaagtaacatttgcacaaatgcactaagaggtcagactgtgaaagatgggcctcagcagcccatgacctagtgtgttttgctcacagtggagagctctgaattttctaactaagctattccacatcttagaatactgataatagccaggcatgatggtgcacaccttttaatcccagtaccagagaggcagaggcagtcagtgagtttgaggacagcctggtctatagagagaattccaggacagccagggctacacagaggaaccctgtcacaaaaccaaagaatattgataataaaccaaagaatattgataatatccatcccctctggaggaggggatcattagtttttttgtttttttgtttttttgttttttttgttttttttttttggtttgtttttggttttttttgttgttgttgttgttgttttctttccctttcttgtggagaatgattggtgttcctagtcatctgaacaacctgagcacagtactgttggcatttactctgcttcctgcgtgtctcagtgtctgttattaactatgagcttttgatgtctacttcaatttaatgtttcaggaagcactcagcactgacctctgctgttcctgtcattagagataattactgtttgcagtttaggaaaagtttgtgttttggtctatcaagcatatttttgtcattagttgtttgtttcttaaaagtttattttatggttggagagaaggcccagcagataaaagcagttactgctcttgcagaggatccaagtttgattcccagcacccatgaattaaaaataataaattagtactaataaataaaataattatttttttaagaagactgtaataaatgcttttgtcctcttaacctcacatcaggaccagggaggaatgctgcatagtctagtactgttttttaaagcaaggtttgcttgttcagatgatccaagatgcagtgttcttacttctgaagaccactgtgtttgcaagcctgaagggaaagaaagctaagagcttgtgctgtttctgtgtctttacagtcatctgtcctgggctcagggtttggagaattggccccatcaaagatggtgaatatctccagctcccagattttggacaagttgaaagcaccaagtttgaattcgtttgctgccacttcaactgcaccgcagagcagtacaagtccaccagccactactgcttcttgggatctaaagccctcagcatcccagtcctcggtcctcaatcattttggtaagtatatgttttctgagctggtttattgtactgagtcagttagcagggcatgttttatgtgaacagtatggtggaacaactaaattaattgtctcattgtacagtgcctccatttgtttattgtacacaattcacaggaatatatagcttcctagctagaagagaagagcaaaaatgctgcatggtaattaatgcctggaattccaacacccaggagttggagggaggaggatcaccataagcttgagaccaacttagtatagagtaagaacctgttgcaaaagccaagcaacagcctctttgggctggcttgttacatgcctttgatcatcatcagtttgagcccagttgctctgcatttcaggactatactttcaaaaaaaaaaatgtcatgcccccccccaacaaaaacaacaacaacaacaacaacaaaaaaacagctggaaaaccaagcaattgggactagagaagtgaattatcgagtcctggttgatctttcagaggacctagcttggaacccaccatccacatgaccacaaaaccttatgtagctccagtttcaggtattctggtgcctttttctaaccttcatgggtacatccacatgatacacagatatgcttgtaggtaaacacctatgcacataaaaagtgtaattactgggttggagagatggctcagaggttaagagcactgactcctcttcataggacccgagttcaatttccaacacctacatggtagctcacaaccatctgtaatgaggtctggtgccctcttctggcatgcaagcatacattcagatagaacattgaataaataataaataaataaataaaacctttaaaaacaagtataataaattaagcaagtagttgctcaaatgaaaagacaaaaggtaagtgaatgcatggtaggggaatctaagtggtagtttgcaactcttaaatacagacatagatagcacttttgagttcttaatgtggaaagtcagtgaaatcactttctcagggttttggggtgcagctcagaagtagagtgtttggctgctgagtgaagccctgggttttaaccacacactacaaaggaaaagaaagtccacaagagctatgatgcacccccattctgccattttgctgtatccatcatgatttggtcaagctttatttttccattgtaaagggagcatgcatatacttgatgttttagtcctgtttcccagctatactcctgtgaatgcttgtgtgagggaatagtccgggttggtagaggggggatttttacatggttgcttttatgcttatcatcatcaataggcagaattctctgcttcctgaaatgacttgccatgctcaaagtaatctttgtgaaggctattaattacttcaactctattggaagctggattcataggcactctgcctgacagagagcattaattacagatttgctgaaagaaaacagatgttgagcatgaaccagggtgtttgtatagacattctaaacacaacaggcactcttattagttcatgtgttgacacttggtgcctaccatatagaaacattgatgttgaatctaaccaacattcaaacacactattcagataatagatataagcttctgctgttagcgtcctcccataatttataagtaagtttatgaataaaagtaggttgtttccatgttctctgtgaagcctgtgttttttgctacctgtctcattgtaattgaacatgaacttacttaaataagatgtgctgtttttattttattattttaaacagtgctatgttgcccaggctggcttttaacttaacaatactcctgccttggcctctgttcttatgagattacaggcatgcatcctaacactcaggtacttggcatttctttactgttttctttttttgtttttcttttttttgttttgttttgtttttgttgtcaccccccccagggtttctttgtgtaaccctggctgttttggaacttgctctgtagaccaggctgtcctctaactcagaggtccacctgcctctgcctcccacatgctgggattaaaggtgtgcaccaccaccaccaccaccaccaccgccacctcctagcagtttgcatttcatttctatgatttctgtttcctgaaattagaagtgttttttgtgttttttgttttgttttttatttttatttttttaattacaattggaggtggacagtggtggttcatgcctttaatcttagcacttctgaggcagaggcaggcagataatttgaattcaaggccagcctggcctacaaagtgacttccaagacagcgaaggcagcacagagaaactgtgtctcaccaaaaaaaaaaaaaaaggtagaaagaaagaaagattgcaattggcatgttctaatagttgattttattgtatggagaaaagagtcgtgtgttcattcattaccatcttgtttttcatagctcatccatataatacgagtatgaaaaaatagactgtatatgctgagttcagtgccctaaaggtgagggaagatgctgtgtgtacattaaaatggagcagcctatgaaaagaaaatgaagatatataaattatgtctgtgtggttttgatagtcaagaacccaggtacaaagttgcttctctagagcaaaaatgagaacagcaatggaaagagttgtgtttgtcacacatgttccttatagttttatattacacataatatatagtaatcaaaatagtttttttagaggcatgtaccaaatcgatggctgtggagatggctcaatttgtaaatgcccactgtgtaaggaggaacatctgtctgtggctgttcacccacatcaacattgggtgcaatggcacacatctgtgatcctagcactgaggaggcctacagtttaattctggagctcactgcctcgatgaatgatgagttcctccaggtccagtgagagaccttgtctcaacaaaaaaaggtagaaaggcactctgggaagcaattagtgatgacccctgcctacacacagagaatacagaaaaattgaaaatataataagcatctacaataacaaacaggtgtgtgtaatacttccatagatatttctacttcatgtcccctcttcatgaaaaataaggaacaaactattcaggcaccaagtgtgtatttgttttcctgttcttccagcaccatactatttactcttttcaagtagatggttcagaacctagtagtaatagaagcctcctgaaactaaaggtatagaagtccaggtgtgttgcagaattactcattgccgcttaacttttccttccacatttcatagacttcaaatctcagcccgagccatccccagttcttagccagttgagccagcgacagcaacatcagaccccggcagtcagtgttcctcctcctggtttggagtcctttgcttcccaggcaaaacaccgagagtcaacacctggagatggtccttctgtcaacagacttttgcagcttcccaacatggctgttgaaaatattgtatctgcccaccaaccacagcccaaacacatgaaactccctaagcgccggatacctccagcatctaaggtaagcattccatgatgaattccatgccaaagggtttatttcacactaacgcaagtatcagaaaactgagtattagacattgggatacagtgccttcaaccatagctcatcatcatcgcttgggaggatttggccatttttcaggcactaggctaattattagagagagtgcagtcaggccgggagacagagcctcttagttcaagtacagacctgagggtctaattgaaaggaagcacttttgttattgtgttggtatctcacagtttggaggtgtgtgattacctgactagataataccttcatcactgctgtgtccctgaaaatagctgaatgtcctcatctactagctaccgttacatcccccaacaactctaaagctacttaatttataatattaacatggaccattcctctacaaaccaataagttgtttgctcgctttccctcactatttaaaaggttctgtttctccccctccctcccctttcccactgtttttgccattgcagcccatggaagccacttgcttgagcctgttgtaagccttaaggcctggagccctggcctctcttcctaacagctttgctttactaggttcccgcttccgcagtggaaatgcctggttctgcagatgtcacagggttaaatgttcagtttggagcactggaatttggatcagaaccatctctttctgattttggatcaacaacttcagccagtgaaaaaaataatcagatgcctatcagcttgtacccgaagtctttaaggtacaaacctcacattttagtttgacaggatatagtcctttctttgcaaagtaaaacaaaacagagtgtaagaaattggtgaagacaatctaataaaggttttgtgcagctctcaacatgtttagcttcacaaactctgctatgcactcctttttcttgctccttccctctgacaaagtgtgtgtcagaactgtctgatcaacatatgtcatgcaagctgaatcctgcaaaatgtggcttttgtatcccttagctttcatttaagctttcagaggtcatccatcatggcttctattgccatccatttcactgagcaaatgtggccgggtcatagttggtagacatataggctttttttctctctttatgggtggtgaatggtattgccgtgttacaatgtttcttgtagcccgataactgagttgtgtgataagcacctggctgtggtcgtactttacactcccccaggagtctacaaggacctagcttctgcacagctttccaacacttcagtgaaaccttttgcaagtagaaagatttgagatttttattagtaggtttttccatgtctagagggaaaacctgttaaattatagactgtagtgcagctttgtagttaatgtgatactgagctggcctggttagtgaagctgtcatatgccagtgtgtgcctaactaacatagtgtactctttccagtgaccctttgaatgcctctttaccaatgaccagtgctgtacagaactccacctacacaacttcagtcattacctcctccagtctgaccagctcgtccttgagctccactagtccagtaacaacgtcttcctcttatgaccagagttctgtacataccaggattgcataccaaagctctgctaacccaccggattcagctccaggctctgttgctgtaagtggttctcctgggtttcttttcttaggatgcacactttagccaattacactttaaaattaatttattagtcaggcaaacacctttaatcccagcattatgaggtagaggcaggtggatctctgaattcaaggccagcctagtctacagagtaggttccaggacagccatgactaaagagaaactatgtctccaaaatgtgatgggggaggggtggtaagacgtcaagagacaacttgtaggagttctctatctagtgttgagaggatctaacactgggtgtcagacttggcatctggtgtctttgctcatagagccatgttgcttgtccatcatagtgtttgagggaaaggaccttgcttttattaaagcaatgaatcaatgaatagtacttttctaccccactgtcacattctaaagtgacattaactacaaagctgcatgtatatagtttttgtttttgtcttttcttttcttttctttttttttttttttttttttttttttttgtgtgtgtgtgtgtgtgtgtgtgtgtgtgtgtgtgtgtgtgacaggatttctttgtgtaactgccctagctggtctggaactagctctgtaggcccctcccgccttagtctcatagagatccacctgcctctgcccctgctggggttaaaggtgttcaccaccacccggccagcctctagtaccagatgtacactaccagaagtgttgcctgtggaacactcatcaaatctaatcagaaaagcattggttattctcataagaggcttatcgttgttaaccagtgggttcttctagtctggattgttgtattcaaggtccatagctaagtaagacttgttttaggggccttggggaccctcctggccaagaactgtaggatagggtatccagcttccaggactggggtttttgtttactaagctattgcttctaagaatagcttgatgcatgagtactggaaatctccattcaaaaaaactgaagcatcattctattaagaatttgagggggactggagggatggctcagggcttagcactgactgttcttccagaggtcctgagttcaattcccagcaaccacatggtggctcacaaccatctgtaatgggatctggtgccctcttctggcaagcactgtatacatgataaataaataaatctttaaaaaaaaaagaatttgagagaaaaacaccagggcaaagcaaggtctagatcttggcagttgctggtcagcagatagagaagaatgagggagaggttggcaagcagctgtggataggaatctctagagaagtggtatgaagcccagcatgtctcaagctggctgtgatgggtctccccagaactgcaatgatagcctgtgagccaccatgtggatgctggccatcaaatacagactccctggaagagcagccagccccctttctgctgtgtcatcattctagtcctagttggacattttaatatagagtgcatcagcttttccctgttgttactttattctggagatggtgtcttagcctcgtgggctctgcttttgagtgcacattctgtggcttcctccccagcctgtgagggcaggtgccattttattgttttagtcagtcccaccacagtgtcttaggtggagtcaagccagttgacttaggttctacaatttgtggagagcatagtcacaacccactctgtcttaaggtcacagctcatcttttcttagaaatagtcctcaatgtgatgcttcctggtatggaagttactctttctttaaaaaggaggttgactttttttttttttaatttagaaacttacctttgcattacagaatttacatgtgaaatgggaagcctcacatgacttaattataatgagacttcatcttccttattcagtttaacaacctgatagctgttttagaagtggtttatcctcctgtgtctttgttacttccctgaattctgaatctgttttcaaaatgcccacttcttgcgatttattaaagttagttgtattttgtcttctttttattttcattttccttttatattagaaaaggaatgaaacagatacgggatggagatgttcggttgtaagagcctgtcctgctcttgcagccacctccggcacatgacacccacctggtacctgagtgacgtgcactcacatagatgatgcacatacacatgagtaaagtctttgaaaagaaataattctcctttgttaacctgtgcatatgggtgttatagtcccaattcagagttaccctggtgattgtctggaaatgtccatgtgttaactctctctctgttctttgtagaatggacatggtggtggccgaagtcagcatacagtagacagtaagtgttatattttcattacaactggtgaaaaccaactggggaaagagtggctaacataattcagaaaacaccaattgagcagtggttaattctccaaaatcagtacttgaccttttccctggaaacccctttttgtttgtttttgagattgtctcactagtagctctgattgacctagcttggcttgctatgtagaccatgctggcctcaaactcacaatacctttgcttgcctctgcttcctgagttcctgaattaaagatgtataccaccataccacacctcagagctactttttctgagggggtgttttagtcactgtgtatcccaggctgactttccagttactaagatgtgaagttatctggggatctcagtgtgcatgtaggaagctaccgtcttgagccattctcactctcccttcctgctccttttctaagggaacattctctgggagtcttttgtgaagtcacccttaggctgtggaagtgacctatatatagcatcttaatttggggtgagatgcttcaccagagtcttcatccagtttctttcagaaccaacttcattttcagaatcagacactagctgggtgttggtgacgcacatctttaatccagagcttgggaggcagagaaaggccggcagatctctgtgagttcgaggccagcctggtgtagagagcgagtactaggacaggctcccagagctacacagagaaaccctgtcttggggaaaaaaaaaacagaaccagactttaaaagtcttaggagtgtgaattcactgcaaacccacctcccccaaccctatcctttagtttcctagcaattatgcaaggattggcaccattcctctcctaatttccctatgtaacacaaggtatttcactccaaactggttgtcctttttgattttcaagtcagggtttctctgtgtagccctggctgtcctggaacccagagagccttgcctctgcctcccaagtgccaagactaaagttgtgtgccaccactgcctgacaaacccataaccacagtcctcttacaaaaccaaaacaaacaaaaaagactcaaaaagaaaaaacaaaaactacaccccattattaattctattccacacttacatattactcaaagataacctaatcatctttttcactatcctatcatatcatattagaggctgaaatggcttcaactagacccaactgggaaaaattaaagcctactcctccatttcccacacagagtgctgctcttccatacaatccaactcatactccttagcccaataattaatatcctaacaacttcagtattccctttgtttttactcattgatattacttccctctcacaaatatgaattaaaatacccattacactatttatagcctctacagtcctatgtctaatttatgtccccacactcactatcgttctagcaaccaacagtaaaatatttaatattagcttggtcaatagactacctccctagcctatatatagctctgagttcagtctctaggaccacatgcaatcaggagtgctggaaggcatgagaatcaaaaggtcatcagtgtggtggtatgtgtgaatgcttcaattccagcattcaagaggtggtggcagaaggattaggagttcaaggttggcctgtgctacatgagtctctgtctcagaaagaaaccaagttggccaagctgcaggccagcctgccccctgcccactgtcaactcttcttgttagagtggagtgcttcctctcagggagctctgcaggagggaagagacgatgatgtgtttccaagcacatatctgacttatgtgcggatgacaatcaagctgagtcttttccacggtcatcagttttatctgtgacatctctgacacaaagacttgtatctgtgctctgtgattaactttttgaaacatataccaaggaagtttccgctgtgcatctgcaagcagatgttggtgtgaattcttactgcagttcatgaacagatttccacatttcccctgaagttccagtgcactctggcagcctggacctttactggcttcaagtggatggaaatgctctgaggaggtctttcttctctctcagctcttccctccctcaagctgtgctttgtaagggatatttgtctcactacatacacgtctgctttggcccgtcttgtcttttctgggtgctggtgccacgtgtcagaaaatgggagaaatatgtccacatcatgacagtttgtttgggtgtcacacgtggttatatagtcctgtctgcaagaagtggagctgcctggtgacatgcttaggctctatcctaggaaaatgttacatgtcatatagcatatctgaatgtgaccagataccgaatatgtctccagtaccaagggttgcttctgaggctaaagagatatgtttcttgcagctacttcatctgttccagctccaaagacgacagatcctccagccctcccatctgtgggctccctacccaacaccacctcctgcactgcacttctgccctcttcatcccagcacactgccactttgccctccttgtcccagtctggtgacctgtccagcaatgccctttctcagcttagcaggtacgtgggtgacagtgagaataagaaaggggatggagacttgtagggctcctatcagatgagaagtgtcatatagactttggttgtgctacacttgtttagactttggcctggtcacatcccagcatcagtagatacgaaaatcctaactgcgtctaatgtttctgctgcagagcctgaggtctgctgagaagcagtgagaacataagcagatacttaaggacttgcttgtccttagtttttgccctgtaccacttgaatgtgtgtctgccttaacgtctgtcctgattccagagatagactactgggataggataaaggaaagggagttagcttgttccccatgcttcctggtagaactcagaacaaacgtggttggttgatttgaactctggatctgatgagaatttaagctggactcttaggtgtgggctaaatagaaactctcttgactctcagtcttctgagctctccagctatgcaatcctggttttattctttttatagccaaaatggttataacttgttgaagccaggatgtatcagatgtcatggtgtatggccctgtagaccatttttgaccaacaggatgactttgtcacatgattctaggggcatcgtcagtgattggattgaccttgattatagcctgttaaaccaggtaagtcagacttccaggaacaaacttgctgacatgtggtactcctttttatcttctagttctctctccagccaccagaacagcttgtcctctccacatacagcgcgccccacaagcacgccccacactgtaagtgcccacacttcctgcactgtatacccagatctcccatgagttggttaattttgatctgagatgacccagagtctcctggttcattgccttagaccttgtgtgctttttcctcacacagatgtcggggctgtgcttgcttcaaggacttagggtgctcttttccctgcagggacagttttgtttcttgccctttttttatttcacaattttttgttgttgttgttattgaagaataggtttgtttctgtttcccgggtctcactgtcctgccttgtggcctaaaaaaaagatacaactaaattgcattcttttgtgttgatgtcattaggactttactaatggtggtgattaggtgtccactttgattgaccttcataccaaattgcctgctaagagacagtgtgagaaaagatgtttttagaaggtcaagaaatctaggctagtggagattcaaagtggagatgtcagcccacatttatgttcactcacatttatggatgtgcactgtgtttttccctgttgcccacacaagtcaggaagagggtttcagatattctcgctttatagctatgcatgattttgagataccaggtgtgtgctagggaccaaatctaggtcctctgcaagcttttaattactgaaccaccatctaaagttcctttcttcttatttatgtatgtgcaactgtttgtgtctgtgtctgtgtgtgactgcaggaaccatagagtctaggaaagggtgttggatcccctggagttgacatgacagttggttgtgggccctctgatatgggtgctgtgtagtggtagtgggatattggcagagacactccccctctagaagagctatgtgcgctcttaaccactggggtttctgtttgagacagtccatggaactcccaaagatccccttgcttctgtctctgaagatgtgtgttatcatgaccagcctccagcccagctttagtagtctggacggtaagtcatggtggctgaatctggccgtacagctagaggctgcactgaccctaagacagggcatctcactcatcttacagccgctgagcaatggcatggctcactgcctggtgagctgtaggagttctttctagctgtcccagctccgtctttcttgctatcaaatccacatgtattggcttttgttttgccagcatgccagtgtggagagcaccccatcctcagccaccttctcaacagctgcaacctctgccccaagtgccccatccacgggggtcgtcttgcctgggagcagtctgtgtctgggtgggaccacagtgagtgtgcccagcaacagtacccgggccacagcgttggtgacctcaggtatgtgcgccaagtcccttacctatctcctcaacgtaaacttccagacctgttccagacctgtacctccacctccacctccacctccacctccacctccacctccacctccaagcagctgagctgcctcacagtgaagtgggtaatctcttgtgtttggtttttcctctttataggcaaagcacccccaaacctgcctcagggggtgcctcctctgctacataatcagtacctcgtgggccctggaggactgcttcctgcttacccggtgagcacatagtagaactcctgattgcctcagggcctgatacattgcaggacttggtaaggggttgtgagttaggacagggctgcccacctgaggcagctcatctccctgtctctgtccacctaatacccaatgtgtcttcctccttctagactctatgtagacatgatctgtagcgcctgacccaagtcccattcctcagtgtgtctgctttggtgtgtgtggtctctaatgtatctgtgactctcctgaagatctatggatatgatgagctttggtgtgtgtggtctctaatgtacctgtgactctcctgcagatctatggatatgatgagctccagatgctgcagtcgaggctgccaatggtgagtacaaaatggcagcccagactctcagctctgctccttaacctgctcgactgccaccacagttggccttctggaccccagctatgggactctcccacactaccactgagaagctgtgtctggtggtgatatgcatggtttgacctgggggaggggaggcagacatatagggagcagtgctcatccccaggagaatttgagagactttagaccacgagcacatgtgaaccatgtcctgtaccaaatgtagtcccttattttcctgctccttttttttatattttcttcttttttaagaaaactaaaaatagctgaacatggaggtccgttcctgtaatcccagcatttgagaggctaaacttgagttagaccaacttaggctatatgttgagatcctgtctcagaagaaacaactatcacacagtcatgagagttgtacttggaaatataatgcagtcttcatctcagggcactggtgtttctttgggctgtagtggccaatggctgccctcatgactgctctcatgctcttctctctgtaggagaatgaggggcggggcttgactgactttattaaactgtcatatgggtttagcctttcacctttatttagaagaacgctgtccctggtgtcattgccttactttcagccagggttgtctgttctgaccctgagtctagggataaaatgatgggtcttataggagagccagtgttgagcagagaaccggagtggcccactcctcatgaagcaggattaccctctggttagccagtctcagcctggtgttttgtagagcatcagtcagtgacagacacagaatgtagacctcaacccaagcatggggctgcctgttcttcctccaggctcactccttctctacacacacccctgtcacatggttgctggccaggccacccagagtgaacagctggagggtcatctcctctccatctgttgaagtccttttcagagccagaggctgcctgaggacctgctgctgggtctaataggacttggaagaagttcctgggtagaatccaagtgtggcctgatgacactcaacagatggctttatcctgtgttaggtgttcttcttggctctccacgcacacccatgggtctccattttttaatttcctgtgtatgcgtgtttcgcctgcatgtatgtaggtgcaccatatatgtgcctggtgcccatagggtggaagaggacatcagatctctggaactggtggcagttgtgaactgccatgtgggttactgcaaaagcagccagttctcttaacctttgagccatctctccagccctttttctttttaaaagttttgtcttagaggacatctgcagtgagctcacagtagaaacagctttaaatttttccttggagcatattccagcctttcttggatttccttgttttatgtgaaagggtactcccttctgggtttcctccccccagtctccatttgggtttctgcaagctctttgcagttttctgtgcctcttggaattctggctgagaattccatgttttcctggtgtttaccaagacttgcagccaaagggttccagtgccactcccagctgagatgctcctgtctggcttggactcagaactagggcagctcagaatcctgggtagtaggggccagggcaggatttcgacctctataaagtataacccctttttactttttgtagctctgtgcagtgtcattgttgccagggctaaatgaattgggagagactaggctagttaggacctagacctgaggtcctgtacctggctctgcttcctgccccttctacgtttccagtggctcttcacttagtctcacagtagagagcagtcaagttggtttgatctgtactgtttaccaagtctccatatgtgttgtaaagataggtgtgagattggctctgtctgatgcaagcattaagatttgcagtctgtccataccttgtcagttgaaacgggggctctgagttgcacaccgagggtattgtcacattggagctctctggtacagctgcccaccatggtcacacagagtgtggcatcacccggagtgcccatgcttgttctgccagctgggtctgctctctgtgagggtgggacagatgatttgctcagtgaatctccttggtcttttctaggattactatggaattccctttgcagcacccacagcccttgccagccgagatgggagtttagctaataatccgtattcaggttagtttgctcagtgggcaagagtgggaagagatgggctggcctggagctagcaattggaggccagaaaggctgaggtgcttgaaggtatgagtcctgagctggcagttcctgttcgtgtttgtaacagccatcctggttcttctaggtgataccacaaagtttggccgaggagactctgcatcccctgcacctccaacgacaccagctcaggcacagcagagccaatctcagacccaccacacggcacagcagccctttttgaatcctgctctgccacctggctacagctatactggcctcccctattacacaggcgtgcccagtgccttccagtatgggcccactatgtttgtgagtatttctgcagggtgctccctgggctgtggcttcctcaaaggttgaaaccctggacatattttccagcgtctgtcagttacatctggccttcaggattgctcaggggtcagagtccattccccagctgccttcagatccctaatggattgcattcatgaaaagactgattctcttggttgtgacttggttttgtctgaggctgcctgatctcctctttgccttattctgacacactcaaacctcacctgcttgtcccactaggtcccgccaacctcggccaagcagcatggtgtgaccctcaacacaccccctaccccttttcagcaggccagtggctatgggcaacacacttacagcacaggtaagggcataccccctgcactgaggggcacagggtaggacagacttgcttagccaacacatgcctctttcttgtaccctgccatgctaggttatgatgatttgacccaggggacagcggcaggagactacaccaagggtggctatggtggatcatcacaggcaccaaacaagtcagctggatctgggcctggcaaaggtagtgtcaggtcctcacctgtaatagttgtctcctatctgactctgaggcagggctaccctgccagtctttggaactggcactgaatgctgtggggaacaactgttttttgtcctaggagtatcagtgtcttcaggcaccactggcctaccggatatgactggttctgtctataacaagacacaggtgagggtatacaaaggtgggcaggtagttggggagtggggagacatcagttcagcctggccttctcattgtcatctttgccctacagacgtttgacaagcagggatttcacgcagggacacccccacctttcagcctgccctctgccttgggctccactgggcccctggcccctggagcagcccctggttatgcgcccgcaccgttcctgcatctcatgcctgcccaccagcagccccacgcccagctgctacaccaccaccttccacaggacagcccggtgagcgcagggatggaggcagcctgcctgccctgggcctggggttgtgtgctacccattatagccttttctcctcttcctcctcagagtggctctgctcagcgcaaccagcccagctccctgcagcccaagactcaagcctccaaacccacctatggcaactctccgtactggacaaactagaccctgaaaacaagagggtgggctcttgtgcaggagagaacacgtggagcacatttctgggagcccggtgccctttcctagaattctgagacataactgtcagctgagcctctgtgggaagcctgcctcccagacccactgttgtatgtaatgtatttatgtatgtatttgtaaatgtgatagaagcctggagggactggggtgtggctactgggcagcatacaagtgtgctgtccccatctggacatcctcactgtagccaagtccacccctcccccccccttctgcctctaggccttccacgtggctcccagctcaggagctgtctggtgtgccactaaagggatggtggtttggggactggggtcaggtaccaatgaagaatcacgacttttctttatctcgctccctgtgaaatattgtttcttccttctgtaattacttcatacttgttgagaaactgatccttttgtcatttgtcatggtcccccttctaacaaatcttcagctgggaatagcagagatgatgcctgcacagcagggccttctgcttttggtctggtcctgccctaggggcttgcctttgaccaaccatttaaagaagaatctgaactgggtctcagagatgttcagcccgtcagctcccttagaaagaaatcaaagatctgcttccatctcagtgaaagcctgtctccaaacaaaggctcctctataccagttgtcccaaaccaggtgggcaactgcttcagggttttctctcacccaaactccacctaataaagttcttgagagcatgctgggtctctgtgtactgtaactaaggatggcttgggagagtaacagacctcacagggatggccatttgaaccgccatcttcttttaacctttctcttcagggcctaggctgtacctatgaaagctagtgtggcttttctgaccacctctcagtaaaacttgggaccaggggccacctttatattcttcagagaacaggagtgccagggtagtgagtgctgtccaaaccccaactgactatgatacagagggaagccaagtgccagaacctttgctttcactgactgtcacaggctgtgccaggcaatgcctggtatcctgaagtgagtgtcacagctcattgtggggtgggtggggaggggagggtgcccatgtagtcccaggacccaggcagaagtggggttagtgcactgttgaagcaggccacatctgttcccatgggattggagggtttgagggtcacaatgacgggcaacctctgctgtcatgaggagagcgtggctggtcataacacacctgtagcttagggtgctgtcagtcacacagtcacgtccgtccttgttctccaactcatgaatgaggggactgaatatgtgctgcctgccatgttctctgcgattcttaatgacaacgaacacaaagtgtttgcccatggatagcaacaagtggccttgactacagaaggtagcttctacgaaaaggttggtggagcccaagtaatggttttaacattttaactggtgacagtgagatatattttttaagggaggtgggtgggaggggatcacccaatagcaatacaggtgtattttatttcacatttttattagtagacaggtgggcagaaaaagacaaaataaatcactaaggggaagtcaacacaaaatgcattggataaacttttttctcataagttaaaactgaaaaaccatctataattttagctaagaaaactattaaagtcaggtgtgtctgctggtttcagttgaaaattgcatctgaatctttttagttgtaaatgtaaaccttgtgtatcagggcaggagggagggtaattttccaagagagctatgcatttcccttccaatggacaggaccaaacataagggaactagcatataatggccaggaaggaggaaagaagggactacaaaagtagagcgaggctcatagaattctggaatgataagagaagtgaggagactgagaagcaacaagagaatcatgatactacacactttctccccacagcctcagggtacatggaagtaaggagcattcattcagtgaggccttgattagactaaaaaaatcttgttcttttcatgccaaataaccacctatacccaaagttctacctgctgcggagacctccatctacccccaaaagtgaaaaaatacactcaagaagttttccacaggacatgttctgagggaccaaagactgaccactaacttgtcactcagtctaactgccagtgtctgcctgccagccagtcagtatagcctttgaactgcctgccctcccatcaaatgcaaagctagccttcagtaatgtcaacaaaggctgaggggccaccatgccacacaggccagcagggcacttccaacaattccaaggtgcctagcatgcccaggagtgaggcgatgttttcatgaaaggcttgtttagaccaaactactagctgtaaactttcaggggccgtggggacaggggtatcagcgctatgaaaggctttggctccaggtttgtaggctatctgggagcactgaagggaactctgggagtttttacaactgtcctacacagcacagcacagcagctgtgtttctgaatcactagacttgggtacagccctggccctgaggagattaatttcaggaccagactaaactttagaggccagagaactgctgggaaatggcattcattcaggagtgtttgaagagtgaatgaaaaccctgagatcagaaaggaaggaggaggaaccatgggaggaagggccacctactcaacagtggaggatccatcctccccaattcctgtctgaagataagaaggagtgacactggcacacaaggatcttaataacctatccttctgaaaactggtttacttcatagcactgctgaagtccctagatggtggaggtttaggagctcagtcttgcctggagtaacatgtgactgaggtccagggaaacaactgcctggactggaaatgcctgcagtcaacagaggccctgacaaaacagaagccaggggaagctccaggaacaattcctgcttgcactccacggccgaagtacactgagaagagaaagatgtccagatcatatccaatgagggaaaacaaccagtcccaagtcacacacatccaaaattatcactaccagtataagcagctcaacgaaaaccaaaatcttaacacatgcacctaggattaatactgaataaacaaaaataaccctcaggtgagagtatctgagatgtttcctctcccgacagtggccacaagtaattttcactcttccccacagcaacaaccaaagctggtataactttaattttttgttttcataattaaaatccacacacactaacctccactcccccccacttgccccactttctggtagaaaaaagttaccctacctttaaaataaatagcaaccgagtgctcagttctatgtaaagtatgaatatttatttcaggctttagatcccaatcgattccaaaaaacaaaatctgatttctctcctcagagtagctgtagcctccatgttgggatgatgtcatagaggcagaagcagcacattcatcaggcttagcaagaggaaggaagtccctgatgcccaccccaccccagcctcaggaagggaaagaaacaaattcaccaccacggggctgaacaaatgcacacgcactaatggaaggagcagctaaaccttggcaaattggcttttttttttttttttaaagtttgttttgtgggttttttttgttttgtttttttttgttttttgtttttttggttttgtgttttttccccccatttccttttgctacccaatatatgcagcacttgtggactcccagtgggttcccagctttaaacacattgatgtcttaaacagactaattcttcaagaatctaaaaacagacaaacgtgttttgctgtgaacattctgcagagatgaagtgaggtgggagtttgaagggcggtggtgtctgttttaaaagaatcaatacagtgatggaagggtgaagaatgcgagaattcagacattctgtgggggttactttctctccagtaaaagtccataaaaaggagcaaactgagatccgcaggggagtcagcaggagctgtgtgtgtttccccaccccatgagtaagttttcactgaggggccaccatagatccccacttgctccctccctttggcctgagacgtcagggcagtacagggtactgaaggaacatgtcacgactcctcattcccagaatcatcatcatcataacagtcggcatcttcttcctcctcatcttcatcatcaatgtcgtcgtcatacaagtcgtcataaagcaaatctgagctgttgtcattggaaggcactttagttttgatgcagtattctgccagggttgtggggaccttcactccatccttctctgcttcagccttagtggccgagacctgtttcctgaagaacgggataacaaaatgtttgtggaagtctgttttgtgagggtttcactaacccacactgactttcaactctaattcttgcccttaagtctcctcatgctgggaatgtgagcacaagccatcatacttgacttagccctgttttgaagacagacttgtaactgaccttaatcaagattctcatcactcactttccaaacacacagcctaagcctacaccacaccaggactctcaacgtggtatcaacatgaagggcccttgtttaattaacacttcagccttgttcactgctgcatggatcaggttagctaacctacagcatttgaaaattctgtcttagccgcccatctcctgctaagggctcagggattacaggtgcatattatgcactactggccttttaagtggtttctgaactcagggtcaggcttgaaggagtgccagaaatcaaacccagggcttggcgcaaacgttctaccactgagctagaggcccagcatatttttagtagcttgaatgcatgaagctgattactcccccatgttactaagtgttgggaatcaaatctagggattcacaagctggacaagcacttctggcaatcacaccttcacacaatccacttcctatcagaatgtgaacttcacatgagagtggacgccatgcccgcctcagtcttccattacctagtgatggcatggcagattaacggatgtgcagcaaatgttgattattaagtgtaggatagtttctttccaaaagtacaaaacccaaagtcatcaggatgggtgaggggggttggaaaaattgaaaacacaagaccaccacttcctgaaactgaagtctgctgcaggcctcgcacacgggtgtttccactgtagcttctataggtctttaccatttacattaattaccttcaattcttgacatacacattcacctcagtggctgaccactaaaaacaagcaggacacagcaatgcacacagtactccccgtgctggggaggcagagtctagatctctgtgttcaagccagcctggtttaaagtgccaccccccagacaaacaaacccaccagagtttgcactactttctagtgagtttgttttggtttctgtaatggattctctttccatagctaaatccattaggttcctactccataaatctgagacattgttttaaagtaacatgatactgaggtttgaatgtgaacaccaagttgactcacctgataatctcggcgtactccttgtctttccctttactgtccctccatttcctgaacataacggaagcgtccacattggctggggaaaaggtgttgggctcattaagcagtgagattacacttaggaggatagtcctgaaaaggagacagaaaaaccatgttcgaaaggacagttgcttttgtttgtttttgagaggagggctgcggaatgagagagaagtttggctgacttctgcgaaggcccttatctaatacaggaagtgctgggaccctgtgtgctcacacctgggaagggcagttaggactgagttctcttaacaagacacactgggagagctcagaacacaaagtacagtttttaaagaaattacacttttaaagtctttctcacttaaaatatcttgatacaaatttgaggcttataaaaaaatgatgatacagttttgtttggggggctggtgaaatggtccatcaagtaaaggtgctttgccaccaagcctgatgacccaacactgatagccaagatgagcatgacaagaggaaaaccccaacaagctgtcctcatacttttgcttagatgccagacatacacccacagaaaacaggagtgaaaaacattcttaagaccagagcctttggggctggagatggctcacaggttaagagcaccgactgctcttccagaggttgagttcaattcccagcaaccacatggtggctcacaaaccatctataatgagatctggtgccctcttctggtgtgcagacatacatgctggcagaacactgtgtacataataaataaatctctgacatcagacctcaccaactctctcaatgcccccaaaccccgacactattcccaacatcccctctcctcatccccttgccccagcccccaacacaagcagagacacaccttcctggatcagaccatcaacctccaattcagggggagaccccctgctcaaccacaggccacacagacctgaagaccagagaggaaacagaaaccaaggaataaaatacccatccaacaaagacaaactcagaaatcggcacctaaacctatatcacccaaacccaagagcctgggtgccagtgtaagagacagtaacgaccagggcaacatggcaccacggagcccagctatgctaccacagaaagccgtgagtattccaacacaactgacatacaagaaaacatccttaaaaccaactttatgaagatggcagaggtcattaaagaggaaatgaacagatcctttaaagaaaccaagaaaaagactaacaacaacaacaaaaaaaaatcaggaaataaatgaattccttaagagggagacagagatttgaaagaaacaaaaatgttcaagaccagaaaatggaaattgaagcaataaagaaaatacaacctgagggaattctggaatgaaaattctaggtaagtgaacaggaactacaaaggcaagcttcatcaacaaaatacaagagatggaagaaagaatctcaggcattgaagattggacagaacaaacagatatgccaaaggaaatgttaaatataaaaaattcctgacataaaacattcaggaaatctgggacactgtgaaaagaccaaacctatgaataataggaatagaaggagaagaatctcagctcaaaggcccagaaaatattttcaacaagatcatgtaagaaaagcttcttaacctaaagaaggacatgcctataaaggtacaagaaccatatagaacaccaaatagatggacaagaaaagaaagtctcctcaccacataatgatcaaaacactaatcatacagaataaagacacgataaagctgtaagggaaaaagaccaagtaacatataaaagcaaacctgtaagaaagacaaccaacttctcaatggagactctaaaagccagaagggcctaaacagatgtcctgcagactctaagggaccacagatgtcagtggtcactatacccagcaaaactttgaatcaccatagatggaggaaacaagatataccatgataaagtcaaatttaaactatctatccacaagtccagcccttcaaatggtactaaaaggaaaactccaacccttaagttggataataatcttaattaactattcccatgaaaacataggaaatcatttcctactagcaaagtcaaaagaaacatgcactaacaaagaaacaggaacaatcaatgatcattgatctatctcaatatcaattccccaataaaaagacacagactaacagaatggatttaaaaacaaaatccagggggctggagagatggctcagaggttaagaggttaagagcactggctgctctttcagaggtcctgagttcaattcccagcaaccacatggtggctcacaaaccatctataatgagatctgttgccctcttctggtgtgcagccatacatgctggcagaacactgtgtacaaaataaatcttaaaaaaaaaaaaaaaaaaatccatccatttgctacatctaagaacatacctcaatatcaaatatagacattacctcagaggaaaggcctggtaaaagattttccaaacaaatggacctaagaagcaagctagtgtagccattctaataactaacaaaatggtcttcaaaataatcaagagagatagggagggacacttcatcctcaccaaaggaaaaaccaatcaagaggatctttcaattcttactatcaatgtccaaattctagggtgcccactgttgtgaaatatttaactatgtaaagatgtgttacatttgtttacttatgaaagaatatattgctattttaccttccctgacaaggcacctgactggtccaataaagagctgaatggccaacagctagggactggtggcgctggtagacggaataacaggagaagtaatctgggaaatagaggaaggaggaaaaaatagggagaagagagagaggccagccaaagacagcaggaaagaaaaaaaggtaaaaagccccgaggtaaaaggtagataaagaaaatgagattaaggggctggagagatggctcagtggttaagagcactgcctgctcttccaaaggtcctgtgttccctttccagtaaccacatggtggctcacaaccatctgtaatgagatttggtgccctcttctggcatgcaggcataaatgcagatggaacactgtacacataaataaatcttaagaaagaaagaaagaaagaaagaaagaaagaaagaaagaaaggaaggaaggaaggaaggaaggaaggcagactaagttaagctagccaggaaacaagcctaagctaggccaagcatgcaaaactaataagaagtctccatgtcatgatttgggagctggttgatggcccaaaagaaaaggcctggtacaaccaagcttataaaagaaacatcactaaagcttaaatcacacattaacagtcatacactaacagtgggaggcttcaatactctactcttgccaattggtcatacagccagaaactaaacagagtaacactggagtaaactgaggttaaaatttaaatggacctaacatatacacaatatttcacccaaacacaaaagaacataccttcttcccagcatctcatggaaccttctccaaaactgaccacataaagcaaatcaacacatacaagaaaattgaaataacttcttgcatcctatcggatttcaagaacagaaacaagagaaagcctacaaactcatggaaactgaacatctttctactgcatgaaaactgagtcaagacagaaataaaagtaaagacttcctagaattccatgaaaatgaaggcacaacatacccaaacttatgggacacaatgaaaccattgctaagaggaaaattcatagcactaagagcctgcatgaagaatttggagaaatgctcactagtgacttaacagcacacctaaaagctctagaacaaaaagtaaactcacctaagaggaggagatggcaggaaataataaaatcaagggttgaaatcaataaaatagaaacagagaacaataaaaggatcgatgaaagagagttggttcttttagaaaatcattaaagatagtcaaagccttatccaaattaactaaaaggccaagagagagcatccagattaacaataccaggaacatgagggagacatatcatgtactccacaaaattggaaaatctaaaaaataaatggataattttctcaacagataccacttagataagttaaatcattatcagataaacaacagaaaaaaaattatagcccctaaggaaatagatgcagtcattaaaaatctcctaaccaaaaaagcccagggccagaattttagtacagaattctgtttttagtacagaattctaccagactttcaaagaagagctaataccaacactcctcaaattattccacaaaatagaaacaatacattgtcaaattcattttatgaggtcacactcaccctgatacccaaaccacacaaagatttaagaaagaaagagaattacagaccaatttcccttatgtagaggcaaaaatactcaataaaacaatggcccctagccgggcggtggtggcacacgcctttaatcccagcatttgggaggtagannnnnnnnnnnnnnnnnnnnnnnnnnnnnnnnnnnnnnnnnnnnnnnnnnnnnnnnnnnnnnnnnnnnnnnnnnnnnnnnnnnnnnnnnnnnnnnnnnnnnnnnnnnnnnnnnaaaacaaaaaaaaaaaaaaaaaaaaaaaaaaaacaatggcccctacccccaaaaagctgggcattggtggtacaagcctttaatcccagcaattaggaagcagaagcaggtgagttcaaggccagtctggtctacagagtgagttccaggaacagccaaggctacacagagaaaccctatttcgaaaaataaaacaacaacaacaaaactgacaaaccaaatccaagaacacattaaaaagatcatccagcgtgaccaagtaggcttcatcccagagatgcagggatggctcaacacatgaaaatcagtcaatgtaatccaccatgtaaacaaaactgaaagaaaaaaaaaacaaaaaacaaaaaaaaacacatgctcatctcaccagatactgaaaaagcctttgacaaaaatcaacaccccttcatgataaaggtcctggagagatcaggaatacaaaagacatgcctaaacataataaaaagcaatatacagcaagccaacagccaacatcaa

SEQ ID NO: 6 - DNA, 3042528 bp, synthetic construct (residues 1-1,521,264 of 3,042,528)
  source 1..3042528: mol_type = other DNA; note = MTMR2 Contig Sequence
  misc_difference 1..3042528: note = N can be a,g,c,t
ggacaggtgtgccggaacacgcccatgagggcggggtgaggggaagtctaaggtgagttcaggaaggcttcttaagggaccgcagacacgtggaccttcccttctccttgcccatcgccgtgctccctcctgctctctctggcccgctttggcctgtgcttggctggtgcatccgaataaagaaactttggccctgttgactgctgactgatcactcctcaggtgtatgtagagggaaatgctaaccacgcccacttgagtgctggcacaggtgatgttgaccacacacacttggacatggtcagagtgacttatcaagactttaaatatgagggtcacacacatgtggctctctctgttccctctccagactggttgtgcaggactggctccttcccatgagtacttcctaataaacaatctgtttttcaaactagttctgattccattgcgatctgcattaattgtgtttcacattacctagtgacctttgccagccctcaagcaggcatggtcagcatttccctctaaaggtgtatcctgtcagaaccccaatgacagtccagtacagatgcctgaatactgtcacttatcactaagccataagctatctccaattgaaaatgaaaatttaaatttacttctctccaagggagaaacaaaccactcttaaggttaggtctcacaatgagccttagatggtcaactcaaaatgaactaagtgccatctttctttctttctttctttctttctttctttctttctttcttccttcctttcttcctccctccctccttccctccctccctctcttcctccctccctctcttcctccctccctccctccctccctcccttcctttctccctccttcccttcctttcttccttcccaccttccttccctccttccttccttccttccttccttccttccttcccaccttccttccttccttttcttttttttttttttgaaattacagattcattatgtatatactacagcttccagttttgtgtttttatgggattcctgtatgtgcacacatgtgtgtccctgcatctgtgcttcttgtgattttttggttctttttcttctgtttgtttgctttgacctattctattttatttgcttttttatattttcttattatcccttagaaatttgtttgtttgctgatgagagacagtaagggtgtggatccagatgggaggtgaggtggggaggaactgggaaatgtaggaggaggggaaatcttaatcagaatatattttatcaaaagagaaaaaaacaattttcaataaaataaaaatgaaagacaaaacatccagtatggtggctaataacattgtcaggcttgcaaaataatcatactcttgaggacccttcctatactgagtcaaaacttaatccaggcaaccagataccaggtagagagtggtggaggcttgataagaacctgaaagggtgccttcagtgatttttttcagccaagatagcacatgcctgatggagccacttgnnnnnnnnnnnnnnnnnnnnnnnnnnnnnnnnnnnnnnnnnnnnnnnnnnnnnnncccatctgctgctgaccactcaggcagagtccatcactggtgtgtagccaaatcagagatgtagacagcttgcactaaccccccaaaaacagaagaaataataaattgttatttgaattcccctaacttttagaggttttttaattcagaaaatactaattgaaataagtaagtaattatatagaaatttagcaaatacttaagtcttattcatcaaaatagaaagggcatttgaaacgttattaattttcaaaacaaacaaatatatgttttaagaatgcaattaaagttcattagcattattatccaccatcccatggaaatggattgccatgggaaattaacattcaataatatctatttagctaatggcttttatttaagtaagcactaaagtgaacattcacaatcattacccatgtactttctttacagtgaggaaaactcacacatatttctgtcaactgtgaaaactccttaaaaagtctattaagcaagtagaaacttcttgaaggagaaaacaggctttttacatcataagctcattttggtgggaaacattgtacataaatagttgtgtaattttagatagatcataggatggtttgagtttcaatttatatttctaaaaaaattaacaaaattatatcagaaccctatgaaaaatcaaggtataatttcacaaaaccagtaactagagatttctagataggacaagaagtcactagttttagcttgattgattaattttaaccagatatttttaaacctgttatagaattgtaagttttttagattaaatttctttattcgaattcttccacatattccttgcaatatttgtgattaattatgcacatgtatgatctaattattagcaaagaagagcagaatataattaggcactagcctctcctggtataaagttcatgtgtttattaatgctgtcaaatttcctttcacgttgaagcatgtagtgtgcacagggattggatcatttcttgggataccagtaataactaacaacattggatttttgttgttttgctttttcaacaaaggaattggtttgaaagtccactaattctctatatgattattgttattgtgaaattgttttgtaaagtctagcacactttgtaaatatgtttgtatttgtaatgttaacttggtataaaacctaaataattttacatcattattttaaaatatttcttcaatgggatcacacaaagtttagggattctctttgtgatagtgagtccatggttacactggaatttccatataacaagacttttgcaagttctttaatgatattagtttaatcttcacaaaaattctagagttaggaaattaacaaggactgaactacctacccttttgtcaggattttggtcatactgtttcatgaatattgataagccgaaggaagggcctaggcttgattgttggataagaaaagctattatattagaccttttagagataaactcaaatgtctacctacaatgcctgtgtatgcaggtatttctctaggaaggaacacatggtgggaaatgtcattttgtaaatatgtttatcttattggttgatgaataaaacaatgttggccaatgaggcagcatgacaggtgggactaggaaatgaggaggattctggtaggtaggcagagagcagtcacgatgtaggaagtgagagaagtagcaagtccggacttgttctcccacaagaactggctaacagtattataatgaatatgtctctgtgtgttgtttggagctgacacggttgtgggaccaggctggtgggaaagtactcctaacagacacaaagcttgaacaagaatgtatttctctgggaaggaacaatttcacctttctgtaattttattccaagacaatggccattttgaagaaattcatcaaattttccacaatgagggatcaatggttaaaacaggctctgctcttgcaaagaatacgatatcagattctctggaggtagaatgacaggtgactgtaagatgataactggggatactcggaactgaaatcaggtcctttacaagaatggtatgtatgtgatcttaacttctgagcactctctccaggcttctacaagccaattcgtgtatatatacattattatttttttgttttggtttggtttttagaggcagggtttctctgtggctttggaggctgtcctggagatcgctctgtagatcaggctgatcacagaaatccaactgcctctgcctccctagtgctgggattaaaggtgtgtgccaccactgcccagctatatacatttttaaattatcacgttatagagagtgatggattaagctacacaaaccaaatgtacacagattaatattactgtactacagtcattgctagaaatatttaaatagaagactaggatacagagtattaaattctgtataattccaaagtaatgttgaggtgtaagtggctaagttccagtgcacttgaaaatgaaatatagaagaggtcatttgctgaagcactggtttcacattgcccacattttttcttcactagtatgcatagaagtaggttgcatagcagtagatgaagaatttctattcttcatttttcacctgaagtgccacccatttaaaactgtgaaagctgcttgtcactccaacttcgtaaagttgacaaggccagtgcagtttctttaaaaatctctgggtgtaaagacattcctctgataaaccacttctgaagtgagaatcagtgtatctgctccttagagaataataatgtgatgtcatggtgtgagttctagtctgaacagccatatttctttatgctcacagttcaaaaatgtgaacactaccatcactccagcttcagacagaaaaaaattatgatccatgaacaggtacagtatttaggtcagcagccaatgatctccttgcgatcatcatcaccttatattaagctgtttcttctggttgagtcaacaaagctctgtgcttgaggagcatctcagtatgtaccatgaacacaaacatatgtgccctgtagtggtaaagtaaatgccactgtgacccattgctattacatatttatggattcctaattttcaactgtcttacaaatgagaaacgacatcaatttgcatttctttagaattctggtcttgctgccagtgaacactgacttttggcactcactgtaaaaatttttgtcaaaatgccatcaaaatatacacaaggctacattaaacacctaaatatttacacaataaagcatcataacaacaatgcatttgagactgcagaatctctctgaataattcaaaatatttgtacactgagataaaagggaagggacagtcatttggcactctgtaatgactcacagtccagacccacctgttttagaatcaaagacaggatttgcatgttttcatatgtctgatgactttatgcaaacactcttttatccagcaacccactagtgactttaatccttgtctttctttctttaatctgtgacctttgtctgtttgttttattttcaaagcactttcatatccaaagtagaatacttttaggaattattttattattcacttgctctagaacgctcggtatataacctccatggtgctaggaaggtataacaagaaaccttctgaagtttttatatcctgtaggtgatgagatgtgccatcagtatcatttaagtgaatcagtaactcccaaccaacattcctccctgatcccctgttatagagttgttatgattttaatatgaaatgtctcttataacctcatgtgtttaaccctttgtcctcagccggtggcactgtttaggaggtttgaaagtttcagaaggctaagccttggtggttcccttggggtagggtttgacagcttatagcccacctcacttcatgagtcttctctgcttactgactgagaggctggcttcctgctctgttgccaagtcttcaacatcatggtgggctgttatctcctcagggtttgtaagccaaaataaaccctgtagggacacacctgtagccagcccttaggaggcttggttacagtgtctccctacaaaaccccttttcactaaagttacattgtggccagatattcaatcacattaacagaaaaaattcaactgaggggctctacattttgtaacattttgtttataaacctcagttcatgttggtaaactccagttcatgcacagatttcttaccacttctggtcacattaatgttcttctgcctccttttgttatgccatagaagtttaaagtaggggatttttttctggtgtggagaatgactaagctttttattttgctaattcaaaatattaatttgtatgtaatatttgttctaagctttagtttgggtgtcacagacacacatatttgcaaaaatttttaaagtaaaaaaggaaagtgataagctttttccataacatctccccaaactcttatattgacactgaaacacctaaacaataaaccccataattaaagtagcccatatgggtccagcagtttctatggaaccatagacattccagccacacaactagatagcacataaagaggtaaaatgggtgagagaaagagagagacagagagacagagagacagagagacagagagacagagagagaaattccacttaagatgaggaaaacatcacagtggaagtagctgactcaggatttgatggatcaattaggcatccaccccagccctggaattccttttatctttctaatgaaaggacactcaggggtaagggaactcttccactcaatctagcagtatttggagctgaacatgatgagaatgtttgtgtagtcatagccaaaagacagtaggtacagttttaaagatgttcattttcttttgaaaatataaaaacctgttagcaatcagaggatattaagtcttaagactgtgaaatatgcctgggagatggctcagcctataaagtgcttagaaaatcagagtgacacataagtgtcaatcctagagacccaaataaatctggatggagtagcctatgtttataactctggggaacctgttgagatggaacacatattctggagaatccttagaagtgtcatggccagctaggctgaatcatacagcaataaacaacaaaagaccctgtattaaaagtagaaggtaaagattgatacttgagagagtcctctaatatctacaacattctatgacatgtattcactctatacccatgaacatgtagaaacacacacacacacacacacacacacacacacacacacacacacacacactcacacaaattatacaataattttagagtgtgtgtttgtactacaatcaagactgtttctgctggtcccaaatgactactgcaacccaaaatccataatttaaattatggaaaaccgaacatgtttcacttcgagtcaacatgtgataggtcacactgttttaccccaaacagtcaagaacaaagagaaagaacagatgttagtctaagtttgttccttactagacttccatattgaagatctgtgtgtgatgccagagcataattctatagttaaaagcactgaaacatattagctacagcaccttcccatgataattcttcaaagctgacatgcttctgaatgtccaaacatcaagataatgactaggatcaagtaaaatgtgtatgaggctacagatcgttttgttgtttgagatggttctgataaaaacaatccagaagatgccctagacatggcccagtgataaagagccattgctggtcttgaagaggactggtgtttagttccacacctacatctggcagctcactatttcctgtaactccagtttcaaaggatctggcaccttcttctcaatatgagcatgtgcacacaggtcacacacacaggtcacacacaagcacacacacacaacacacacacacacacacacacacacacacacacacacactttattttaaacacagaaaatactatattaatataattgctcggaacaggttttaaaaagttaaccagagtgagtagtaaatgtcagaaattatctcaattttcaatatctagttagagcaacattttaagttaatcttagcagaaaattcaagtgccataccacttcaccattggagcatactgtccagtgtcaaagagcctttccctatgcttccctgactttctccagagagtggatgaaatgctatggttttattgtcctcagagagctctttatagaacactcgcctaactacattccctaactgtctttgcaactatgtgctgatcctgtgattgtcctttagccaaagctggacttgtgtgctcctttactgtttctgactctgcagatccacttcttcccatttgctggtgtttctaagactttccctgcactgttctaaatgaaagcatctggagaagaaataaaaagattacagaaaaataggatgcaatgaataagacatgtcaccatgtctttgaaggctgtgaacaaacttatcacagaaccaaacagcatttaatcttgtgttgttttcctggtgtttgtttgtttgttttgtctctgtgtttaccttgtggattttgttttgtttttagtgctgggattaaacatagagacttagtcttgctaatcatatgctttatcacagagctacactgcatcctcttttgtagaactagtttttatgtgtgtgtatgtgtgtgcacatgttggggaagggtgcacatgaaggtgtgtgaacatagaggactcagatcaatgtaagatgtcttcctcatcattctctatcatattttttttgaggcaaggtctctcactatatgtaaagctcattaattcagaagattaggttgccagtgagctctagtctccaccatccacaactgccattacaggtgagtgcagcattgttcaagtttttaagttaggtacttgggatccaaagccaggttcttaatctgttctcaggggcacccctgtatccactgtcttctcagtgtcttttgtagattttaacaatcctggctgcaatgagtatccatctatgtagctactcactgagaaattctgaactccaagcagaaaccacaaaggatttttcaaaggctgtggtgcctacttgtattagcactaagggcacagaaatgcctctttaatgaaaatatgcacagaatttctcatctccagacgttctaaatgaagaaagcaagggatagccctttatgttcagaaaaaaatcatttggattttaaatgttgccaatacttcctgttgtcattttagtttaatttgaagtaattaacttagtattaaaatttcaatagaaatacataccccttctacttcagcagtatcccaataaccctaattcactaaaaattagcgctgtaatttatagaaacaccaagatgaatcacttttagatgtaattatcaccatttgctggaagttatgaggaaaatttgtgggaaacatttttctaaactgaaggaactaggagccacacacagactaatacactcatttctggctcaaccactgtaatgctttctcacttggtagttctctaatttgtgtaaatcatctatactgttttgctcaattttatcttgtttgtgtctttattgataaatgtattttgtgtgcatttcaaattttattccactccagcatcaaaggttttccttaagtaaattgatatcaaatcttgatttttatacaagtgtggtatctataggatagtatttatccatatttaaatacagaggtgcataaccagtttctgaataagatgtacaatatttgtgaatatttagttgtaaatccttttgagttaagttcccagactgataggtgggaaaccagcatgagactgctccagacctcctgaatgtggatgtcactgagaagatcttggaaatctaaggggccccttgtagtggatcagtacttatccctagcataggaatggactcttcgagcccattccacatggagggatactccctgatcctaggcacaagggggtgagcctaggccctatctcaaaggataccaggctctgaagaccccctaaggaaggcctcactctccttggggagcaaaaagggtatgagatatgtagggtgttagttgggggtggcaggggaggaggggagggagaggaacctggaattgacatgtaaaataaacttctttctaattaaaataaaaataaaattgacacattaaactttatcttagttttaaaaattcaagttacatatcaggtgtttaatttgggcttcacctgcacgcagcttagctatttcacctacctctgatttcatccctccactctcttagctgtctgtgcttggcctggtttctcttttaaatcaagattaaataaaatgtacttgaacttgtgcatgtcttaatgggagttttttttcctttcccttcaccataatttacaaacattcttacatataatcatcatttaaccactttgtccagaataaaaccttcagacatatgacttcgaattccattatcaattttgacttttactcgtattgctacaacattcagaagttacttatagtatatatttgcttaatattattatttttttcaccactcaccaatcaccagttctgtacagttattatgccatatggtatctggcatcagttttgacactgtatgagagttcaaagttgacattgctttgaaggcagacagtatctagtgttgatttgctatcaaaaacacaagaattatctgtaccccacttttctcatacatatgtaaaaactctgggcagatggatagttaaatgaatagttaactataatactgagtggaagacttcaatgaataaagtgtcaggactttgagtattatggtaacatagaccagatatctatttctatatatatagacaagataacatataatgttctcataaacataataaatccattgagggaataggggctgaggggttttagttactcaggcagtgagataaataacatgtgacagcctctcttttgtatagatttaatttttatgtatgtctacatgtgtctgccacatgagtgcaaatttctgcagagaccagaagaggatataggatcccctggagctggagttgcaggtgactgtgagcaatggggttctggaagagcaccatgagttcttaactgatgcaccatgtctccagccacaggcagcttcttttacattagcaacacactgagaaaatggaaacactattaatacattttcaatgtatttgcagacctagaggaaacatcaataaatgctctcatttatttttcaaaaaatctgcatttcacaaaatgattcttgaattttttaaaataaattacgacacatcatttttattatattccattaaactgttcttttttggatgaacttagatttttttgaagttaagggtcatcttaagggacatagacaaaacattttaatttgattattaaagtttctcatgtgaaggaaaccgtttcttaaaaatagaacctaattgatggtttgtaaccatttcatgggttagacattttcattctgtgacagagacgatataacaatgtatgttgaacaagaattcacttgtgaaaaacaataaaaagtgaataagaaacacattggcatcatggtaactgtctcacagtgaataatatttgaatatttatttttgtgtatgagaacaagccatagcatgtttgtggaggtcaaagaacatcttgcatgagtttcattgtagcttaattttttttcactgtggttgtgtattgtgaccaattaagagtgatcaaattaaagctaatacataattgtgtttgggtaagatggtgcacatactcatagttccgagacaatttctttcaagcatattatgtacatcagtcaatatcgcatgttatatactgtatttacagaatccatgtcacttacttggaccacttttaataattttctgtacttcattttcatttaaaaataagttatgggatttaaacagtaaaaaataagaggacattccagagctgaatagaagtaaaagtaggccaagattggcagccttccatctaaggttaggcattacagaagttatggtgcccactatgaaaatcatggtaaggagatgataacatacaagaatattttataaatatgaaagaatgtgaattataactgctagaccagatagagctgaactagagaagatctggagataatattttgagtaacaaatcagataaaataaatctaaaatatacttgtcagtgaaacctgcaactttgaaaacacctaaccatatgtaaaattacagaaattgaagccactgcaatagcatatctcattgagaaatactgaaaaatgactaagatttgggcagcaggatggcttataagacaaagctatctatctgcaagcctaattcccctaagtattatccacatggtagaaagcaagaattgacaggaagaacagttatgtcctaagctttatctaagtacacggcacatgaacatctccctccattgagcctccttctaaacaaatatttaactaaataactgaatataaaaattattttaaggagccaaaattaaatcagtaatctattcaccaagatgtccactctacttcattctcaatcttaatacaagtagttcaatattgtgtccctacttatccatctatgaaatagacaccagacatactgtgctttctatataaataattagggtaatatttgtaatgtgcttatcacagtatgccttgaaaccctcagggtgtcattgtcactgagagtcactggacactcagatcaatgtcactcactccaatcccttcttgcttctgtagttaacccagattttggacagcactgtcatgaaagggtgattccacaggatgtcagaatacatgcccagctctgaaacatccataatgttttgaaggactcacgaatgtgtcactttaacctgtattctactctacctggcaagtacaaagaattgtgctgtaagtatgcatctcatctttcccatatgcctcttcaaaaataatttcttggcctataaatattataaatatgagaataggaggactatctcattcaactttcttcctatgttcttgtctctggcaaaggattgctaattatccactaactttaaatttttctgtttgcctgagtagctaatgtccaccaaatattatctttcttttataaaccttatctgcagtaaagaaaacctatatgcatgccatggaccaaacattccacatgagagatggcgccacactgggccactgcacagagggcatgggtgagattcaggatgaagctgctctttcctgttggtgagcagaagcatgaagtctcagatgacttaatttctaaatcttcctgagtgaagcaaaacagctcccccaaggagctgcagagtagctctgatcaagaagtgtaatgtaatttacatgtcattagtgggtgctaaagagagagttttgtggggaagactgctggattctcttgaagaggatctaggtttgattcccaccatttacactgtggctcacaagtacctgctactccagttccactcaataataccctcttctgacctcctgtgggctactgcaggcctatggcacacatgaacttactcaagtgcacacacatacatatgaaaataaacaaataaagaaatacactttaaaaggtcattaggctgagatttatccagtgttccctcacctgcctggctataacatcttgacaaatgtccttcttttcttcaaagagtgacatttacaagggactgttataagtatcacagcaatgcacaaaaatcttctttcatgggagtattgctaaaccctgcaattatgtcactgttattaaaagaaaaacaaatgtttgatcttgtcaggaaatctgtcaaactgccttttctacatggaaggaaagaacatttattcttccagtatcatactgaaattttctacttaaagagcattgtgtcaaactttgaaaggtagcattgatcctaaaagataccctagagttgtgtttcagtaaattcaactggactgtagccacttcaggttcaagtatctctgagtgaattgtattgagtcgattttctttgccatgagtcacattaagtactgtcctcaagttgaatgagattagatcttaaacagtattctcagttactgatttaagtgagaaattaaggagaatggtgttcattttaatgaagaaaattttcttaagttgtcaaaacaacatgcctagtagaaaccggagctttctaaatatgtacaccattcccgcagaaatttcaggcacctgtttcatatgaacacattgtgaaatgaataaccaaacaagcacagctggggaagccaactagctttagcatctgagttactgtgtgtagatttcaaaagttcatcctggaagctgttatcagacaggttgtgtctttttgcagaaactcattcccttttgtttctgcttaacagtttctaaagaatgggagggagctaggattatgtcaaatacttctggacacaacaaaggaaatgaagactcgtgaatcctggcttctgtttcacagagtgagtgagacaggtagttaaatgctatagcttttacctgccatttataactgaagctagtagactattccctaagcctaaacccttcaaacctcagcttgataaagagtgggatgctgacagcttcctggatgatttaagaaatggcaaaatacctcaaaatgaataaatgctacttactgtctgcttaagaaaacaaacaaaacatagaatgggcataaaatgctaacattgcatgaaaacatgtgtttcaattgttttcctgacaccaaacaggaaatcataactgtggtgtcaaatatgccttgtaggagtaagtctgcttccctgctttgttctgttactctgttaatgcaggaattaagttaacctgggccactgtctcctgggctaagatgatatgtgtctgggccctacacctttgtttataagctaggaactgaagacctccctgaataacaggaatggttgcatcttcctatagctctgagttctgcttcattgctttctgatgcaaatgaactggtatttcttttagctctatggaatgcagttaaacaccacctgcatccttctgatggcaaatgtgagtcttttaatcattgttcaaaattctttctttctttaaagattatttcacaaaaaaacatctgttccatacatcacatctgctagcatcttccacttccttacactgattcagctgaatgaataagcatttctaatcctcagaatacacagacaagcaggccaaatgggccagtggttaaaggtatttgctatacaagccttgtgatcagagtttgaccttggaacgtacaaaaatggatgaagagatgctgctccatgaagttgttctcttatctacacaggcatgccatgggccatacaccccacacacatcatatatacatataaacaattataataaaaaattcaatagctacatgaattcagtaagtatgatcctgttcgtgtataatgtggctcacaatgatcctccctggagatcaaatgctaagttcaatcattttagccacattggaattaaacactaattaggaaaagtcaaagacaagcattcaaatactgtttatacattttgaatcctaaaaaaatttccttaatcatatactatcacagttgtgaatgcaagcatatattacctcatatgattatcctaaatgtggacagtaaatacttcaaatacaaatactgcaatttctttgttaagaaataaactatgtgaatgataacaattatagtttttgttgctctgaggagaaaatcattaggaaaactagtgggtttatttttctgttcatttcagcttgttataaattagatgtgggatacctgcaagagttgtggtttgctctgctgcattcatggggaggttatgttttttcacagactcagaaagactaagctaaggggagaggaaggttgtcttgctcaaatcagtcttcataacttttgttctctatcctttctgaaattgctcagcaataatgttttaactcttagcctctcctgacaaaacatggtagtcattaactaccctctgagaacaagacaactccctactatcttctccatccaaaggaatctcaacatcttaggtaattagcatcaagtcagggaacactatgatcccatgattctttctttcaacctttactcttaaggatcagatgtagcttggagtttttatgggactcctaactgtgggcatgggggcatttctgactcttttggctgctcttgggataatcttcatcctactggattgtctcgttgagtcttgagatgagggattgtacttagtcttattataaatttttatgttgtgtttggttaatgtttatgggaggcctgcccttttctgaagagaaacagagcagtagtggatctgggggagaggtgaagttgtgtgagtaggggtggaactaagaggatttcagggaggagaaactgtgatcagctgagatgtaatgtttgaaagaagaagaaatttaaaaagaaaaaacaggaatgaaaataatctaattcctcatacttgagtggatatatccactttctgtcatattaacttggagtcccacccctcatcacacaatgtcatacattctgctcccctccacaagcttctatggtaggacactttcactttagccacctgattctgacaaaggcctttgagttaaccatgagacagtttcttgctctctctatcctttctgtactgtctacattctttctatcactatatcctgtcatgtctataatctgtcttcatgtcactgagatttttatggctgcttgtagagacaatctcttgtatatatgctaaaattatttttcttgtttctttaaaaaaattcacagttctatttatgcccccaaatacaagagcatacacatatgtaaaaaaaatggtaaaaactcaaatcatatgtgaaacctcacacactaataattggagacttaaacaccctactcataccaatggacaggtctgctggacagaaacttaacagagaaataagggaagtaatagacattatgactcaaatatatttaacagacatctatagaacaatccatccaaacacaaaacaatgcaccttcttctcagcacctcatggaaccttctctgaaattgaacacatacttggtcacaaagcaaatctcaacacataaaaagattggaataacccactgtatcttatcagatcaccatggcttgatgttagaattcaccaacaacacatattacaggaagcctacaaactcatggaaactgaacagtgttcaaatgaatcaccactgggtcaaggaagaaaaaaagaaataaattaaagacttcctagaattcaatgaaaatgaatgcacaacatacccaaacttatggaacactatgaaggcagtgctaagaggaaagttcattgcattaagtgtctacatgaagaatttggagaaacttcagtctagaaaattaatagtacacatgaaagctctctttcaaagaaccaaactcacccaggaggagtagaaggcaggctataaacaaactgagggctgaaatcaataaaatagaaacaaagaatcaatgaaacaaagtttgttagagaaaatcaacaaatagacaaactcatatcaaaattaaacaaaacgcagaaagatagtttcaaatcaacaaaataagaaaggaagaaggaacacaacaacagacactgaggaaatctaaagaataattaagtcatacttcaaaaacttgtactgaacaaactttgaaactctaaaaaaaataaacaattttctgggtaggtaccacataccaaagttaaatcaagaccagatttaaatagacctataacctgcaatggacatcgaagcagtcattaaaattctacctgaatttcaaagaagagctaataccaataatccctaaattgttccacacaataggccacagaaaagacattaccaaactctttctatgaggctatagttactctgataccaaaaccatccaaagatgcagcaaagaaatagaattacatatcaatctccctcatgatcattaatgcaaaaaattttcaataaaatatctggaaaccaaaaccagaaacacatcaaaaattatccaatatgatcaagtaggcttcatcccagagatgtacagatggatcaacatatgaaaatctgtcaacataatttgccatataaacaaactgcaaaaagaaacagctaatcatcttattagatactgaaaaagcctttgacaaaatccaaaggatatgatagactttgaagaacccctaaggaaggcctcaccctccctggggagcaaatagagtatggaataggtagggtattagttgggggagcagtggaggaggggagggagagtgacctgggattaacatgtaaaataacatttattctaattaaaataaaaaacatctaaaaataaattgggaatcaatctacctctagacccagccatcccactcttgggaataaacccaaaggatgctcagtcataccatatggatacttgctcaactatgtccctagcagcattatgtgtaatagccagaatctggaaacaacctagatgcccctcaaatgaagagtggataaagaaatcgtggtacatttacataatagagtattactcatctgtaaaaaacaatggcatcttgaaattttcaggcaaatggatggaactagaaaaaatcatcctgagtgaggtaacccaaacacagaaagacaaacacagtatgtactcactcataagtggatattagatataaagcaatagataacccaggctatgatctacaaccccagagaagctaggtaacaaggaagaccttaagagatacaaatggatgctctgggaagagaagatctcctgggtaaaatgaggatggaagagtagaggggaggtgattggggatgggaacatgaggtattgagacggccgagttgcccggagagacagagagggagaacaataaaccatgtattttgacatagggggtcattatggcgttatggagaaacctaatgttagggaaattcccatgaatccacaaggatcacccaggtaagactcctagtaatagtggagatggtccctgaactagccttctcctgtaatcagattagtgactagccttattgtcatcatagagccatcatgcagtagctgatgtaagcagatgcagagatctgcagccaagcactgggttgagcttcaggagtccatttgaagagagggtggcaggattatatgagcaaggggagggtcaagatcatgatgtggaaacccacagagatagctaacctcctagtgggagttaatggactctagattactaggaagcctgcatgggaactaactaggctctctgaatgtggacagcagttgtatagcttgatctgtttgagaggtccctggcagtggaaccaggatccatgcctggtacatgagcttgcattttggaacctactctttatggtgggatgactcactaaaccttgatgcaagaggggaggatcttggtcctgccgaaatatgatatgctagactttgttgactcccacgagaggtgttaccctttctgaggagtagatggggtgggggtagaaaggaggtgggggagggaatgtgaggagaggagggaggggaaactggatggtatgtaaaataaattttaaaaattaattaaaatatgccgagttctagttcattctcctaccctgttactaatttctgcatccaggaagataaaaatagagataccttacaccctatatttattcactttcttaatttatatcttaatttatataatttatatttcctgttccaaatttgcctaatatcttacttctgtgatattgaaagaagctaaacacagattctttctttcattgctcttttcctttgccctgttccttagttcccacatcatatctcctaactcacatttcttttcttctcctctctcacggtggaatttgctctggactccctctgacatcagtgcccagttcctcttcattcccctgtgctttgctcagcagccccctacagcctatttcccactatataacaatggaggttctatgtgaacctacatagtgcatgtccctttgttgttgttaaattctcaaaatccttaatcttattcaaaccccaaaattgtttagatcatctacaaggcactaaatggtttgcttcttcctccctattttatcctatccctcagccaagttgtgcctttaaatgctgtctactgcccgtgcccagctgctcatctgacagtacccctgaattaaaatgaggtccctggctagtgacacaatcctcactgggattatgattctgaatgcaaacatctaggcccttgtatctaaaacaatacagatttttaaaatatcaccagacaatttacatacacattagattttgcaaaaaaaaaaaatgtgtgtattaccagaatgagaaaaaacattataaagtttaattcctcctcttgaaactccactacttatttgttagaaatcataccttagaaaatttctttgaaacatatatacttgttttggatattaaataagcattttgacagttttataatctctggtatccaagtcaagaacctgggagctatctctttcacaagcaaatgtcaaggaagatagcacacccatctctagttccttttggagagtaacatcctgatttccttgggttcctttctccaaattggagaattatattctatcataaagagaagtttgtttttgccatagatcaaggcaactatcaagcacaaatagtcaacccaattaccaaataagttagcatgaattgtgcattacatagggtactgtcctcttacctgaggacctgttattgttcatcttgatgtgtgatagaatgagcacatcttgcctggaagaaaaagcaagactgctgctgtctttgccagtctttaaactctgtttcacattccatttcagtgcttagttggtaatagaagtgttttcttctcctagtaccttcgcagagaggaatttcgggtttggggatcttatttttaagcttatttcctcagcagttaggatttctaccctagatgcaagcttcatttgatggacaaaagtctaaagtttgtctcatttccacatcaccttgagccaggttgtggttgagcagacatgcctccaccctctcctccactctcaacctgaaccacagcaacaatctctgttcttatgatcaccaagggcaataattcactagaaaatatgtagagtagtaaacagttgaagtgtgtttcagcagcttggtattttagcagcagtgaagtatgacctccatggtggaggcaagacagggccgagcagcaatggcaaaaggcttcctcaagttactggatgtagaggtcatgatctaccatttctcttgcccttggccatctgggagagatttgagatagtgcctttccttgaagaagtggaggctttcttagaggccatgtttacccacatttcgagatgctttaaactcatgaatacacacaagcacgttattattcattgagacattcactaggggaaaagctaacacagttctgacttggtggttcagtaggagtttgcatgagctaagcagagcttgccaagactggcttttttgttttcccagggtctgatagtttttatctagtcagcatggatagtttatatcccactgcatgccctctgtgtaaatgacatagacaacaaccttgctgctttaaccctagtattctttttaagcctagcattcatgttaaccctggcatgtgtgtgaacataatagtcacaatttcccctattaattttctaagcatttcaaacacattgtatggaggacaccttgaattatcactatcaatggtttcttctttactgtttcattcttttaagttttccaactagtatctgggcttctgaaaatctgaaataatactgaagtactttattttataatgatggcatgaacaatctttctgcattttgtccccgtcactacagatgccagcacctggaaatgctgctcatattcctatgtgtgcatgaggataaattagagtgagctgtcattcatagaatgtgttaatggtcctaatcagatgcttaaaaatatttagtttctcatatcaaaaaataaaaccatcaaaccaattaacctagatggcatgttccagtgattttaatgactgtcactatttaaattattactgcacagtaaaatactagaaataaattaagcttctttcttgttctcctttcaaatttctgttcataattcttgctttgtctcctgtcccactccagatttctacctcaagctgacttgattgctctgatgacctcaatcaaaaggcaattaccttgtgagggtggaaggtaattattcctatctcgtggagattgaacactcctcaatagacagctgccgctcttttttcaggatgacattattgccacagaattggactctgaaaatttctgatgcatgtaaaaatctacgatacgttgttgatttattttcgcgatttctatggcagctattcttctccctgctacaagccatgtttctaaaagacaacatgaattagactgtgcgtagcctttggagaaacttgaaggttgactcaggttttaaattcaagctcacaaagcactcagtactatgagatgatttttaccagactacaaaaatcttacagaaacgactcgaaaatgtgtaactataaaactcataaaattcagacacatgaaatgcactaaatagttggaaaacaccaaaaatggggaaaagtaagtcataaaattgccaattattttctcattttaagacagctatgtaccataaagcacactatttgtcaatctgaatagactagaattgggtgtgtccacatgacactgatgtgacagacgcacagtcattcctggattttatgtgagtgctaggaatttgggctggaatgaaaaatgccatctatcacctcagacatttagcctctttatttccagttgatcctgctgtttggggagatttgggaggtatgtccctgccgggcataatatgtcacttgatgtgggttttcaagcttgtggttggaggtgtgagttcttagcttcatccagttccactgcttgctgtaaggtctctccaccacaaaaataataataataataataataataataataataataataataaagaactaagagtggtggagagtaaatgtttctattacaacaaaagggacgaaagagccccctttcttcctgccccatcccttgtgtagtctctccaaggtaaagttaggaacttggacattgaattaatctcaaaattattcactactaaaatgatttgttagttacttacctcaatgtcctacaagtccagaatggaatttgagatatctttttcgcctctgtgtcaacagacactcacatagtgcctagcatgtaatcgaaattctatacgtatttacttgtagaaaatatcaactaatagtatggatttggatgcttccctaattacaaaaggcagttcattctatgtaactctgagtacttttctgacgagaagatagttttaactgccaggttgcggggggatggggggggcgatgagtgcagaataaaacagcatgggagctattgttaatatggaactgccttgtattaagctaaaatttgcaaaactcaccgggcttatattaatgctaaataaatggttactaactacactgtgacagtggctgacacacctatttatgcaaagcatttgttcatattttctggcttacttttctcacattactatccattgctgggatttctttctttcataggggaccagatgattggtgtccaagattcatcaaagaaacaaatctgaatcaaactgagtcagtctatggagcctcatagcaagactttatatttgagagagggctgtgctaaatcaacctgaatggtcttctaacacgatgtatgtctgtttctcccagcctcagatttatccagagtgtggctcttactttgtcttattttaattatctgtctcccttgccagcctgcctcgtaaaagctcagctcctcattatcacacatccgggaaaatcagcatgttttgttgtacagtggatgttgtacattgactgaattaataaaggcaatagtgaggtacttatgtaagtaatttatttgtatattaaataaggagcatgtatgcaattacttaattgtaaaaggaactatcactatgcgaaaactcaagaacaaaaattgttggtaattagaaatttcctagaaactgactacttcctgcagactccacccgatactactattgaatccatcctactgtaagtaaaaatactgcatttaaatggagcatgatgcatatcactcattagctacagtccatatagctttagcttagtatcatcactgatttccttgctgtggggctttgtatttaacacttcccacccctaataagctaaaaacaaccaattagcctttcttgtcacagcatggttccagcatccatccagagttgtgagagggtaaaagcagaagccaccatttagcccagatataaagaataggaccatgtacaacacacaattttaaaagctttgaaataaaccttcaacttctggaggaattatatgtatttcattgtccctcatcctaccaacaaacattctctaggctctacaaaattaaagagctcaccctaacaattagcaggagctgtctgtaactctagaccctccagcccatgtccacaacggtttgaagagcatccctcggttgctactgtgggccccatcagttgagtgccctctaaagagaaatgatagtagagtaagaatggctcttattttctatttatttggtcagggtttaggcaaatgttcacatgtcatagctaagatgacagagcattaaaacagtgaactgtcagagttggcgaggtggcaagcccttatttctctgtggatgatatgtgaagcttgaacttttgtacaatacccataggtcaatttggactcatcaacatgcttgtgagttatgatgtttgatagtggctttgtttgcagggaacatagagacaatttacattgtgtcctgatctgatttaccaggcatttcagaaaaaaaaaaaattactgcctatggggaatggaattttgagtggggtttactgaccagaccttttccattttatcagtgaactacaaaaggaaaagtcctgagcatattgttttcttgacaattaaactggattgtggaataaagccttggggctagccccagtaatcagaagaccatctccataacaaaataacctaatatagaatttaattttggcctttgataaatagtccaatcccatgctatccacatgaaaaaatcaggagtgagaaccagagacatgtggatgtaaacataataggaaagcgttggtgtttgaagaaagcatctgattgccagaaaaggtcttgcacttgacctgaaaacttcaggcctgtgtcctgcagctgtggtaatatgatgaagtctttttgatttgtgtaataaggtttatatatcaggggatagtgttagggggaaaatctaaaaactcctttgctggaaacttttttatcctgtaaagaactaagcatgtgcaaatgataatttccacttgtctctgataatattgcagtatcggtttcaatgaatttcattacatagcagaactggggagggtttaacacaactcctgtgtgtaggcttctaaagacttcctgtcagtttgattttattgtctttttttttttttgccttcagacatagttccaaaacactccacaacacaaaaaacaattgtgattcatacaatttcttttccatttaaaataaaactccacagattttcttttttgcaaagttgtttacaaaggaatgtgaaaaaaaactaaccttactgtccagaaactggagatgatttatttttttgtaatatggcgattccagtagaattctgtcagcccactctgatattctccttgaaatcatatagaaatcacaaatgtaatcttggattaacctttacaatattggcttttcaagcagtgttgcaagcagcaagtatacaggggcagaatacaagctactttgaaactttgtctggtttaatctttaaattacctctgtaactagggctgtgtttttcataaatccaaagaaaagttgttcaagtcagcatggtgtagcagtttaaaagatatcacagttgaagcataaaagttttctgtattcaaactttttcagctgggctcagtggcacctacttatgatctcaaaactcaggcagcagagacagagatggtcataagttcaaggtcagcatggtccacaagtgggaacccctatctcaaaaaacttcaagcatagaatgtaactcattggtagaatgcttgtctagcatatgcagacaaaaccttggatttgagctcaaggaaaaacaaagcatttggttgcacacatctgaggctcccaaggtatcaaaataagaacttaatatgtattgaatctaataatatctaattaccattatattcaaaaacatgaaccagatgtgcttgctggagattaaaagtaatgggaattttgcaagaaccacaatgtgatgaatgtgtaaaagaatagaaacaaatcactgctgtcttcaaaatatttgccacagaatatatattaaattctctaaccttgtcttctactatataaaaatacactataatgtaaatggtgggggaaactcacacattgaaaatgataatggccatgatgatatttttataaatgaagtcactctgaatcttcaatacaatgcatttctggggacatggagactgcatgtgtggagggcagtgctggagaccataagaagaaaaacaagttcactcatgccacattttaatacttagcaatttctttctataataaatcttatctaataaaaacaaggttttgtatttgtttgctttcataccataattgtttattgattctttgggaatttcacatcatgcaccctaattctgctcatctcccagtcttcctatatcctctcctcaccactgcagcactccaacagaaaatcaaaccaaaagatagcatatcaagcaaacaaataaccgtaagaataaaacaaaacaacagcaacaaaaaccacccccaaaaaaatccctcttcactgtagaggagacttttctccatgtagccctatcccacttggaccagtttctctctgccaactgagtcccaacagctgcttataggataaccactcagagacttaatatatatttataattgattggccaatgactcacgcttattactggctagctctctcttataaattaacccatttctactaatctgtgtatccctatgtggctgtggcttactggtgatgccctggtatttgcctcccctggggctacatggcatctctctgactctgtcttccttctctctttgcatctttgtttggaattcttgcctagctttactctgcttagccattggccaaaacaggtttattcatcaaccaataaaggcaatatatatttgcaccatacagaaggattttgcatatcactttgctttctcattttttcccacctttccaacaactgtttatccatcctggtggtattaggagctgtataccgttttgcccaataggctttactagcaaatgttcacagcaagaaggcattggtatggttctagtcctcttgtttctggcacaccatcatccctggatactcacagagactcctctgggatatctgacagtcaccctaagtcatggagatattgtctgtatctttccacaagacaagttccttcaagaggctccagcaggtagtagatgatgtagatgttagggtgggccaagcctaggccagttgtgtgcctgggtggtaaatgaactggtcatcccaagtcactgggacaacctgcctcacggggtcagagccagcttccctaagcctatgacatcatagtcagtttacccttgcttatggcgaggagtgaggtcatctctccgcagtacatgggtcaggtttccagtgagtgagggttggaatcagctctcttgctgcagtgaccagcaagaggcagggccagcattcccagagccagcaaggtactggattggctcaatatggccctctgattctgtcacacttgattccttttgccccctgaggtggcacagactaaagatgtcaacatagtcccctgctgcagctgagccatggacccagacagggccctttgcagcatctcagacctacacaacatcctggctctgcttggaagcactggccactcagatcaggataactccagtagcagcataacccccaataccagcaaggccacagctgttgccccaacatgcaacttcagtgtgacctttggtggcaacacaggtctccataatcaatttatttaataataattcaaaatttgtctactaaaccaaatccttttaaaataagtttagaaagataatccattaatacttagcttgttgatataaaagtttttttttcaatgtttattttttcatgttagtgtgtgcttgcatgtgttagttcatatgcctggagatgcccatggaggcaaaaagagggcatcagactcctacccacaaccctgtgatggagttaccagctgttgtgagctgcccaatgtgggtgctgggaactgaatagagttctctgcaagagcagtatgtgttcttaaccactgagccatcttgtcagcctgagctaaagaactttaaagtaagcacacatttgttgttagactctggtgtgtttgggtacacgcacgtgcgcacgtgtgtgtgtgtgtgtgtgtgtgtgtgtgtgtgtgtttgtgtgcatgcacgtgtgtgtatgcatgtatgtgcgcatgtgcacaagcatgcatgtcaaaataaatcagtataacctatgtagggcttgagatttcttgattttaatgaacttaagtttttgaaagaaaaaattgaccaaattgagaccagaaataaatgtgtttttccactttagggaatttattcaactcctgagaattgcctactaaagaccacacctcagctgcccttaccattccagatggttccaacactggatggctttctacaaggggaagagctgccctgatgattattctccactatgctaggttctggtattcacaggtatcaaagcaagtctttacctaggctttgttatagtaactcacaagaagaagtattttgagagttatcgttttggcttgtcatttcatctgagctttcttaattaacaatggttatttatagaatagaatcaaagactctggcaatcctgtatctgcctcccttcctcattagatgaattgaatgttcttgctctgactgtttctttctttgcttcctgtcctcgcctctgtcattcactccagacgcaaaggcttccttccctgatctcaaaaaaagcaagagtattgtttgctggcagtttgggacttgccctcctatgatttaacacatcctccagacatcccaaacttgggacctccccacactgcctgtctttgctcaagtgacacctcaatagagaaagcctctcagacttgcctcccacatggctcctctcttcatcctactgtgctctgtctgcatagacttcatcaactccataaccttgggtattcacttggtccttgttgtatttgtagtatagttcaacatcctgtttgcacttttttgagtttcaatatttataatagtttatggtcctcagtagatatatagtcaatataagtgtgtgtacataagaacacacaataaaaacctttctaaattttaaattcagtatattcactctgagataccaatactgcaagctaagtgctttcttgttccccaagttttaattcagttgggctaacacattataagatatagctggatagaaagacaatacatagagcttccacgtccattgtggttagcagggatgaggctttcttttcaaacatcagctaattaacactggcatacagaggatcactaaagcttttctactgtgtctatttgttgagtaaacagaagatccagtcatttgtattaaatctgtctcctagccacaatgcctggttctgccataagtagatttgtgagagatgtgttgacatttaatttatgcatcaacaagaatcaatttattttaggcaggaaacattgggtttggcagaatacttgagattataaatgcaaggctttttttccagatggagaaatttcttgctgtgttacttttaccaacataaaaatgtttttatatggaaagtatggatacatagttttattaatacaataaagatttgtgaagaaaaatggttttcagaatcgctaatattttgtgctgtgcagtgccttcatagtaacttttcagattactagtgtgcctgtttgtgccccttgctcctaggttgctttgtgtgtggctgtatatcaactacaggattctttgttccccgctacagatgatcttctaaccatctcctacatggagcccgagtgatttgcctgcagaaggtaaggagcagcatatgcaccggggactctgagttctcaattaaaaaacagtgaaataaaaagtctacaagttgcaagaagacaagactggatcaggagtctcagaattcatctgcttctgtaacacacaaaaaaagccacaccatcaagtgtacctacagacatttttttttttttttttttttttttggtttttcaagacagggtttctctgtatagctttggagcctatcctggcacttactctggagaccaggctggcctcaaactcacagagatccacctgcctctgcctcccaagtgctgggatgaaagccatgtgccaccaatgcccggctacatacagactttctttagataataacactattgaattgactatattttctttacactgatagcatattgataattcaaatttaaaagaagtgatctgtatttagaaaaaagacaaccaaatcaggtctaatccacaagttaaagcaaccaatgttgttattcaataaggagaaaacattttcattagagaatgtggagtattaatgtcaaggagatagaggaactatgggaaaagaacctgagtacttgtataaggattcctcatggctaaattattcctatggaaaatttgaccaaaaggccatccaattcactggattcttatgaatatcagagcattagctatgaagaatgcagaagtgcagtccatacacagtgatgacatctgtgaggatgataggatggtgaggaccatgtttatagagatatggataaagatggtcacagttgctaagcattactaagtactatcactgcttaatcagctttctgtgactgggggtacctgtcagagcacatgcatgtgaaggctggttgtcaacctcaggcaccagtcctcagtaagcaaagaccttggatttagagataagtctttccctgggttggaagctcacttacatatttggcttaagctggctgtctagtgaggcccagggaatctactgcctctgtctctgcctctgcctctgcctctgcctctgcctctgcccctctctatctgcctctctgcctctctctgcctctctnnnnnnnnnnnnnnnnnnnnnnnnnnnnnnnnnnnnnnnnnnnnnnnnnnnnnnnnnnnttctctccccccctgcctctccctctccctctccctctgcctctctgtctcactgcctctctgcctctctctgcctctctctgcctcactgcctctctctgcctctctgcctctctgcctctctctgcctctctctgcctctctctgtctctctgtctctctgcctgtgcctctgcctctctacctctctgcctctctgcctctctgcctctctctgcctctctctgcctctctctgtctctctgtctctctgcctgtgcctctgcctctctacctctctgcctctctgcctctctgcctctctctgcctctctctgcctctctctgtctctctgtctctctgcctgtgcctctgcctctctacctctctgcctctctgcctctctgcctctctctgcctctctctgcctctctctgtctctctgtctctctgcctgtgcctctgcctctctacctctctgcctctctgcctctctgcctctctctgcctctctctgcctctctctgtctctctgtctctctgcctgtgcctctgcctctctacctctctgcctctctgcctctctgcctctctctgcctctctctgcctctctctgtctctctgtctctctgcctgtgcctctgcctctctacctctctgcctctctgcctctctgcctctctctgcctctctctgcctctctctgtctctctgtctctctgcctgtgcctctgcctctctacctctctgcctctctgcctctctgcctctctctgcctctctctgcctctctctgtctctctgtctctctgcctgtgcctctgcctctctacctctctgcctctctgcctctctgcctctctctgcctctctctgcctctctctgtctctctgtctctctgcctgtgcctctgcctctctacctctctgcctctctgcctctctgcctctctctgcctctctctgcctctctctgtctctctgtctctctgcctgtgcctctgcctctctacctctctgcctctctgcctctctgcctctctctgcctctctctgcctctctctgtctctctgtctctctgcctgtgcctctgcctctctacctctctgcctctctgcctctctgcctctctctgcctctctctgcctctctctgtctctctgtctctctgcctgtgcctctgcctctctacctctctgcctctctgcctctctgcctctctctgcctctctctgcctctctctgtctctctgtctctctgcctgtgcctctgcctctctacctctctgcctctctgcctctctgcctctctctgcctctctctgcctctctctgtctctctgtctctctgcctgtgcctctgcctctctacctctctgcctctctgcctctctgcctctctctgcctctctctgcctctctctgtctctctgtctctctgcctgtgcctctgcctctctacctctctgcctctctgcctctctgcctctctctgcctctctctgcctctctctgtctctctgtctctctgcctgtgcctctgcctctctacctctctgcctctctgcctctctgcctctctctgcctctctctgcctctctctgtctctctgtctctctgcctgtgcctctgcctctctacctctctgcctctctgcctctctgcctctctctgcctctctctgcctctctctgtctctctgtctctctgcctgtgcctctgcctctctacctctctgcctctctgcctctctgcctctctctgcctctctctgcctctctctgtctctctgtctctctgcctgtgcctctgcctctctacctctctgcctctctgcctctctgcctctctctgcctctctctgcctctctctgtctctctgtctctctgcctgtgcctctgcctctctacctctctgcctctctgcctctctgcctctctgcctctctgcctctatctgcctctctgcctctctctgcctctctgcctctctctgctctctgcctctctgcctctctgcctccctgcctccctgcctccctgcctccctgcctccctgcctccctgcctctctccctccctcccagttttgctttgagacaaggtatatcccagggtggcctcaaacttgccccgtagccaatcctccagcctcacccgagcgagtgctgggattataggtgtatgctgttcttattccatggaaattgctgtttgggagcattgggattcaggttttcagcatttgggattatatacttcagatattctgagttttggggggtgaggggaatcttgttctttcaagcttttgactttagagctggtattgatctgtgaggtcatgtgtttggaggtggcggcgattgattctgaagtcagggcaggatggcttacaagcggttgacttgttgggggcagtttggatgttctcacccttgggtgaagttggtggtgcctccccactgctgggtttacatacacatgccaccatggtgtctagtgggtgtggatcaaatgcctttatacctgtgggacccaggtgtctccctagcctcctaaccaggctgcttctcctccccctcccccttctttttcaagacaggttttctctgtgtaacagtcctggaactcactctgaagaccaaactggccttgaactcacagagatctgcctgcctctgcctcccaagtaatggcttcataactagatattacagttttctcaaacaaaataattgagaattctgctatagtcacatagtagctagaaatacacaattaagtactaaacagcatagtgtgagctatgtactcatcttggtttactgcagcctccccttacatttataataaaaaattccacaaagtctcagtgatcctctctctttttcttctcaagaaggtaaaaatgtcttccctttaaataagacccatataagatgtcatatattgaagatattttaataaagcataatttgagataatttcaaataatgatacttaaaagctccatttctgaaataatttgtttttactgaggcatcttcttcatgtagtaaaaataattcagagtaatgcattcaccctggctcagaggtcacgggttagagtctgcaggtgggtgacacatgtctattccaacctcctcaatagggaccaggcatcgttttcatcccatagtgttatctgggtctgaagtctattttactgatgagccctatggaagatgtgatacccacatcccatgggtttccaaaggcattcttttgctcagtttaataacttttaattttctatatataatctttgtctcatgacccagagccttccaagtcaaggcaatgttcttattccttgaactctaagctgtagaatggtaacaacttgaaatagaatgcttcaaaagaaagggacttctgcgatcttagttcatttccaagcaacacacaggtaaactaggtaaaaactgcaggtcttcctacatcatttttatacttttgatttcatctttgccttttccaatcaataactacatttatataatgtggatatctcaatccttagagggatttatgttatacaggtcgaacttactgtaaatttagcatttattatttcataaactaagctgattattttgagacattgtttggagagtataattgaaaaatatattaagagaacctaatggcaacttttttgttcataaaaagtaagagaatgttagtaaccacttggctcagtatctagaactaaagccaggcaatgtgtgtgcttttattgttctcttctgtggtttggaaatgtctaagattagattggtaaaggagagtgcataaaattgctgattcatagctttgctaataataaacagtgatgaggaactataaatgactattagtgaacagtgtgagcagtagctgtaatgaacacagaggggtgcatttctaaaatagcatgtgccatatgtacatgcaaaataattgtgcaatgaatgcacgcatcactcatgcagtgttttgcaaatcagcaaacatcctgaagttccttctaatgggaagtttgctgattggggctcagggaaaatcaagcatgatttgggtagtgctatctgggaagctcacagctgtttcatttcattctgatttcatattagtctctttctcccaaacactggttttggaactctttccttcagtcattaggaaaaaaagctttcaaagaaaacccactgcccctgatcttctggagaaaccaggtaggtagccacactttcatgaaaactttagaccatttttctccttcatcttaattctaggggttgttaagaggttttgctttaaccatggacactagtggaagcactgttgacactgttccttgagagaaatgtaacaaggcttcatgttttgtgattgatcatgaagtgtgactccttcacactctacctttgaaacacaaaaatacaagcaagcctgaacttactttgttctataatgaatcacactgaacactagtgcaaagacatctgccaccttctttgtaattatctgcctataaatgttttctcctactatgccttgaatgaggatataacattattaatcatcacattcctggcactaggtactgaatgcttggtgagagaatgagatagcctgtcatgaaaattgcctgaaaagtttattatgagaataacataatctgacagacaaaaacacaaagcataaatccggaaaatagtaaaattccaagacacaatggttgagtgtgctccctcatgacggtttatttcttggcttttccatatgacatcctttcattctgctaagtagccacactattccaacaaatcagttctgttcctgaatcagtgcttatatcattctgttgacatattaagtaccacagtaggctcactcctctgtatcctgtcagaagccttttccatcttcaccatgctgcttctgtgtatagccattcaccaattcctgttaactcttgatgtactttgtccttttataaacgccaacaagatggagctgcagtaggggatgcttctgatctgagctgtgacattttgcaagagtacctcaaaacattcggagattagtaacagtccttgagaattaaaagaacactataaatataaattaaaatatttcaatgaatgattactgaataattattctagttaagaaacaatatttcactactattataattaaaagcaatttaaagaaaatcttttagaggtacaccattaaaagctacaaaagattttactaagagaagagctgactggagatttattgtaaacatagttaccagaatatgtgctttaaaatgatccaaacaatgcatgggtatgctcagaaaattcaaatgaagtctgtatgctgtattcagtcatccaattcttttacataaaatgatgcagtatgtactcatctatgctctaaagggaagaggccctgattcgaatttcatttcatagcctatacaaacattcaaaaaatagaaactattttttagaaggttaaatttgaagaagaacaaatctgcatacacatctaatttgaaagtaatgtttgtatagataatctaagaagcttacaaaatgtctagggtatcaaagcttatttcacctacataactgacaaaaatttcctttaaaccagtctttaaagtatgtatttgttaagtaatggacatttcttttaagagatcaatatttttggaaggcctccattaacaattaattaaaaagtacacatcacacctcacatacacatattatacatttatctatacatattactgaaaagatttttatttttagccggcaattgtatttcatctatagatgatatgtcaagtgaacataaaatatttttacatgttttataggccttcaaaatgtgatatactgtgtgaaatatatcaatatatttaagttattgatcgtaaaaggtttcatacacccatgaagtgatcttttctcgcacaaccactttcctttttttatttgagttacaaacacgaatgacaatcccagttcccttctctctcccctcctcccctaccatgcccctcaactaaaaccctacctatcgcatatcctttcttctattccataccccacacaaactttctcctccctcttgacctctgcatccttcctcttcttcccttctcattctcgtagctccctctgccctcttcccatgctctcaatttgctcaagggatcgtgtccctttcccttctccaggggacaaaaatttgtctcttttagggtctccttgtttactagtttctatggcagtgtggattgtaggctagtaatcctttactctttgtctaaaatccacatatgagtgagtacatatcatgtttgtctttttgtgattgggttacctccctcagaatggtttctttgagttccattcattttcttgcaaatttcaagattccattgtttttttctgctgagtagtattccattgtgtaaaatgtgtaccacattttctctccattctttgagcacaaccacttttcaagacaagattttttattgacttattatttgtgtgcatctctatatagatatgtgcagtgaatgcagtgtcctccatgactaaagaaaggagtcagatatatttgccaggagaaagaaaattaaagcatactgttctcacattcttgggaaacattatcatcatctgccctcaactggaaacatccatgatgatctttaaagaaaatatcgttatacagctatgaagtgaaatatgagctatgatgtaatgtggaggaccaaataattctgttatgaaatattttgagatccagcctccagtttcactaaacaggagcacctggaagctctggcccactattgtattgctaattttgagcaagtctactattgtttaccatagcctcagtataggatgtctcctagtttgcatctctattgggcctaagcatctgaataggcctgcacctgggtagagaggcaaggtgtaagtaactagggagtgttaggagccctcaaggagagaggagaacaaggacagaagtcatctcgtggtcatggcaggacggttaagaaacagctgaaaagatgacaaagaaaaaactctagttttacaacatggaactgagagctctctaaagattacaagatgcctgtgtttggtctttatagccgctgggttgctaggagtttccagttccacgcaccccgactcaggccaaacctcatgggttaaggctgagacatgccgggtcatgacaatgtaatagatagattaccaagcattgggaagaaacaaaatgactcttcactgtgtaaggttaaggaatggaagccagcatgaagagctacacctctcatagtaaaggggccagcttccattttggcagccataacggcagaacacgtgcttgcttctatgaccttgtactagacactagaaagtcagatgcctgcctcgtgacaaggaaccaatcagaagttagctggtagcgctatgctttacaaacctgggtgtgctttacggacaagcgcacagcaataacgtagagagcatagcaaccatcctgggagggactatgggccataacaaccagttgaccaatcaacacagggcaaaccctccaagcctggaggcacaccaattgtgagcctgtgcgtacccctagatactccccttacgctgtcctataagatctcttgggagaccctaggagccgtcttttctagccatccgccatggcgggtgggtgaaagacctgagctaacatggggttagctcgttaaattacaataaagcctcttgcagtttgcagcaagctctcgaatctgcctggtgattggggtgaccgtgaacgtggcctgggacgccagatacttgagttttccgggggtctaaaaatagttcagaggtgatgagtgctatgttctatgagatttaagggcagattgacagtatgaagcccaaaagaagtgtttgcatggaacaccagccactacagtgatgatggagcacagtgggcttttgttaaaataccatgtgattaccaatgcaaaaggacatcttcatgtatacaagtaaaattaatttagatgaaactgcacaatataacagaatctaaattacatcacagtacaaaagaagggaaagaagggaggaaggagggagggaagaaaggaaggattgcccatttactctggtggggaataccatttgtaagactaaaaaagaggaaaaaatcccactgttttctaattaataaaatatttccatagagtatgaagttacagttattaagttactgtaagtgtgtactatagagaaaagcaaagggttgattatagtgagagccacatttcccctgttggaatgtgaagttacaaggaagcagaggatgagtgaagacttccaatgtgctaatgaactggagttgcagatactacatgaactcatggccagcttgatttagccacagtgaggttagccatgtaatttttgttatgtcatcagataagcccttacattaataataaccccctgtagtgataaggaagtttaggattcacaaagattttctaatttttttaatacctgtatccaggatctccataaaaaggaataattctgaggtggggaaacgaatctgtgagtttggatctttgtggttttgtgttaatactacacgaaataagctcccagaagacaaacaacaaagatgtgcataggttcatgtaaagtaaggtgatgtacatatacaatcctaatcttggcattgtgaatgcagaaggaggaagaacaaagttcaaggtcatgctcagctacatcatgggtttgggacatacaaagttatatgagacttgatcttaaaaaataagataaataataaaacaataacaacaaaacaaaaaggaatgcagactctgccaaaatttccaaatgatctgcaaagagctggaacaatataaggtgctattgaataatattagaaataaatattcaattgatacaaataaatgattaaatatattgtttgtagacagacaataaatagattaaggagaaaaatactgtgcagatgaattccagacaactcctatagctatgttgttgttcaggtgattgctacttcagagatctgaatttacagcttaacaatgggaaagtttccagagatactgtggagagctgatgaagttcagcacctgctaacagggatcatgacctgctgtgacacatgagagctgcatttcatcactgtgtttggcctctgacctgtcacatctcctggaggaggagttctagaaaatgtctgaagagtgaccctcagattgacattcagtcaacaagtagcaatgactgagaaatgtcactggcctgtgtcctcagagtccaaactaaagtttgcttctctaacatcttacttgggttaaaggcaaagcaaggcaggtattattaacaattaacataactggatctagaaacaacaaggagagaatcctctgggcacactatgccagattatatagatcaggttagactctgagcatgtctgtgagggattatctagatcaggttagcctcagggcttgtcagtgtggggggattacctagatcaggttagcctctggacatgtctgcaactgattataaggaataaattaactgaagagtggggagacccactctactattgggctgggccagtccctgggtttgaaccttggactagataaaaggataatctagctgagaagcagccctctcattccatttcttgtctgtggatgcaatgtaactgactgcctaagctcctgccaccatgcctttataccgtgatggactctgacctggaactgtgagctgaaacaaactcttcactaagttgctttagtctagtattttgtgccagcaccataaaaagtaactaaaatacaaggccagacctcctgaggagcacagtttgttcatttctataacctgaatgagacaattgcaagataaaatcctagcaaagcctggcacttccagccatcacacacctattgactttcttctccagttttgcagtatcctgccaataccaacattcattccagtgctgtgaaggaggacatcacatgcttgatggctagctcagggtgcctgctatttttttcattattgaaagaaatcatgaaaaggttttcttcttactgcatggttggtttctttggcatccttaaatattcattgaatttataacaggacacacttgccagaaaatgttttcttataattaaaatattttaaatttttctttagatgtgtagtccatgttattctcttataagatcagttgaaccattatttcatcagcatgaaatatattgtacaaatgcttcctttcaaagaattttcacatttgttaatatttataaaactagaagaatattgaccatgtggcatctgtgaagtgaacctctggctggacaaacatgactttcatgatacctgggttgtatgacaagcatttaaaaaactttgtattacaggtaactagattcttgtgtattttattcagaatcacatcttaaagaatcacaaacattgtgtgcattttatgtaattttatttttttcttgtgttgcagttttgaaaatctgatctattttcttgaggtttccattgagaatagtcaccaagcactcagaaatctaaacatatctcatgtcagtttctcataatcatgaaagtctagcctctgtatggatacggaaacacaaaaaaatataatcctgagttcagtctacacattagtcctagagtttatttaaaatttggaaggtaaaacttgaatattaatcacaattcatttgttttaatttacaaagatacattaaatgcataatttttagtatttccccttcatagtattttgctgaggaattatggaaaacaaggagaataaaatatttcttaccaatttcccccttgcttgctgttgactttaattttcctcagccaaaatacacacaagttgatattcaataatactaaattgagtataattttcctttctcttgggaagaaagtttcattatctacttatacccatagtttgtgaataaagagggtgtttcatgtattggcaaagacagagaaggcatgaaactcccctaatgtaatttcatctaattaaagactcgttaagaaagaaatagaaatgagaatttgcctcagaacttgcttaagtaattttaatttttaatcattttcttctctcactaattaaacagtttgataggtacctatcggctatttacctcattttctgtattttatcctacaatttaacatgtgcccaccaatcaaaccactctgctctctgcaggtgtttggctcatttcccacactgtatatattttctttttaactattaccaagacataatttactttccttataaaactacctatttcctttacatcttacaaaatgaactttggatataaatatgatatttaaagaacaaaagagatgggaagaaaagtcaacaaaggtaatactaacaaatggtaaaaaccagtcaaggagagtcactggtcacaggaaacacagcacattaaaatgtgagggctggaatcatagaacacttattctggaatcagagttgtcaaatttatgagttgtaggaacatggatgctcagttttgagctctctcagccttgctcccttcatctgcaaaatggttacaacacaacttaccttgtgagatagccagatcaacatcatccataacacatacagcacagtactgattgccaatgacttttgttcaaataaagtcccttgttcatattcaacctcctggtttcttatccaatccaggtttgtgctcatgcattcccttgctccacactcctcatagccacttctgcatcaagtttcttgcccttacatgtttctgactttgtgcttgtgctatttgtactagttgatggactttatttccaatcgtcagtttttatgataggaaacacctgttcttctttcacattagtctgaggtctttcctaggtgagtgtttcccttatattaaaatttaaacacagtcttacttaaaattgatacatgcataaataaaattgtatgtgttaatggagtaccatgtgatctgcatggtatgcaatcttatacatagttctccacaaacatttgccattttaataacagtactatatcattacccatccatcccatcatagcatatatccgaaggatatatcttttgagtttggtgtagctctaatcacagtaggcaagacaggaaacaaccaaagtgacactcaattaagaatggataaagaaaaggtgagaagggagcacaaccaaattctattcagctataaaaccaaacaaaatcctgtcacttatcacagcatggaaggaactagagaccatcacagaaagtgaaataagcaacacacagagtgacaaggatcttcaatttgaaatgcataaaacttaatgtcatagaaactgagaataaaataatggttaacagaggctggggatagtggagatggacatggaaaaaagaaggattgattgctcaatgggaattaagttgtagttaatgtaaatattgatttatctgcatacttctggggtgctattgtatagtaagatgattacaattagaaataatttactgtgagtttcagaaatctagctttatttcccttatagatttctatttttagtcactgttggcagaaatgtttcttgacatcatttcattttgttcagtctttttaagctgtgctatgtggcctgtcacattatctgccctagagaattttccacatgctgatgaaagaaatattgttcccctgccaccgtatggcatgttctgtagctctctgaaagtcaatttccctgggatgcaacttcaccatactgtttctttgttgattttttttggtctgaattattttccattactgcaaatggtctgctcacattccctgaaactattgtgtgaacacttatctatactctctgtcttactaatataggctttgaatatttgagtggtccaaaagttagtacatatataattgctacttttttgttttgtaattctatccttatcattatgggatgattctatcctcttttctttccaatacttttgtattaaagactacgttactccataactatagcttctcctgatatcttctggattctgttttcatataacatcttattccattcttcactttggttgtatctgtgttctagagaagtttctggaaggtgcctgtagtcaggtttatcttgacagtgttagaacatgcagctacctatgaattttatacctctcattgttttcatcttactcattaatgacatttacagtttggagaactctctaatatatcttgccagtagttccagtagatctgtgttctcacccattatttatctgggaataataaggggctctggtttctaaacagtagctttacatggtggagtattcttgttttgttctccattcatgactactgtgaaaacattttgccactctctgtcatggaatagaagatttgatcaactatgtaaagatgtgttgcttttgtttatgctgcatttgtttaactatgtaaagatgatgtgttgctgtttcacttgtcatcattgtctaataaaaagccaaatgtccaattgatgggggaaatagttctatgtatgtttatcttattgattgttaaataaagtacttgcttggccaatgagacagcaggttaggctggactaggagtcaaagaggaatctgggaaatgtagtagagaagtggtgttccaggcaggaagtgacatagcaaggagactcatatttaagaagagaaaaaaggaagtgtcgctctctttttccatttctgctccagtggcgggatgtgattcaccagcaaggagggacgccaataaggcgtccgataagataagtctcataaaatatatagatgtatggtaattgagactgagctaacagatgagaatcctagtcattggccaagctgctttgtaactaatacaagtctctctgtgtattcatttgggcctaacttgggcaggtggctggcgtaaagcttatccttgggacttcctggccagccagcatnnnnnnnnnnnnnnnnnnnnnnnnnnnnnnnnnnnnnnnnnnnnnnnnnnnnnnnnnnnnnnnnnnnnnnnnnnnnnnnnnnnnnnnnnnnnnnnnnnnnnnnnnnnnnnnnnnnnnnnnnnnnnnnnnnnnnnnnnnnnnnnnnnnnnnnnnnnnnnnnnnnnnnnnnnnnnnnnnnnnnnnnnnnnnnnnnnnnnnnnnnnnnnnnnnnnnnnnnnnnnnnnnnnnnnnnnnnnnnnnnnnnnnnnnnnnnnnnnnnnnnnnnnnnnnnnnnnnnnnnnnnnnnnnnnnnnnnnnnnnnnnnnnnnnnnnnnnnnnnnnnnnnnnnnnnnnnnnnnnnnnnnnnnnnnnnnnnnnnnnnnnnnnnnnnnnnnnnnnnnnnnnnnnnnnnnnnnnnnnnnnnnnnnnnnnnnnnnnnnnnnnnnnnnnnnnnnnnnnnnnnnnnnnnnnnnnnnnnnnncatttctgctccagtggcagggtgtgattcaccagcaaggagggacgcccataaggcgtccgataagataagtctcataaaatatatagatgtatggtaattgagactgagctaacagatgagaatcctagtcattggccaagctgctttgtaactaatacaagtctctctgtgtattcatttgggcctaacttgggcgggcggctggcataaagctcgcatgtggcggtggggctcaggcagcttttggtggaaagatttatcataacagtccaatagctaggcaagggagagatagctggggctggagggcagagtgaaaaggggaaccagccagccagtaagacagcagccagccatctggggaccagtcagccagacatagagaaaaaaggacagcaggatggacagtgcataaacaatccttggggcagcacatagattaatagaaatggattaatttaagtttaaaaaaagatagctagacacaagtctaagctaaggccaagcatccataattaataataagtctctgtgtcataatttgggagctggaagtccaaaaagtcagctacaattctcacccagcctgaagatatctgttgaaagttggaacagtcatacccctttacatgctgcttctgttttattccagctctcaatctttcactttggttttgtggtgtgtgcacatgtgttttgtatcccgagataaactctggcatctttcctcaagagttttcttgtttggcttaacatagggtctttcattggcctggagcttgtggactagggtaggctggttggcctgggagcctgccaagggaggggattacaagcactgtttcccacatctgcatttttacatggttacatggaatggaacttgggtcctcaagaatctgccttgccaattcctttcctctttaacttttgagagctttattatactgtgccatgggagtaaagctcatactatgtcaggggtagagtccaccctcaacagtgacctttaactttccagtaccagatgtttaaattcttctccaaactggggaagttttcattcattattttatagtttttttttttttttagctcctttggtgttttcaagtaaagtcattgagttactatggtaatttatggaaacttgtgaagttacatcatgattatccaaaagtttctaaagtctattgatttatgatattatctaacctttagcctttaaatgactgatattttagtccagtgttccttaagtagctttattagtatctgtgtttctggaaatactaatgatctgcttattttatctgacctatattcacttctgctacatcagcactgagcagtgttcatgtttaggtctgcccagagctttctgctctagttttatcagagttgcagaattaatgggaaagtcaaaccaaattttctctcaaaccttccattattatactattcaaaatgaactagtagactagggaaaataatttatctgttcgagtctggtcttagggctagggtaggccaaggcacttactcaccatcacttgcctaaattcaggcattataggattctgcttggatctatgcatagacatcaagaatgagtaccatcaggctcctaactcatgtctagttaccaataatacatatctgtggcatagtcctgttgctaggactatagcctgctaagaccagaaacactgaaaaaggaccaaagttcattctatgggatgactactatatagatggtcttgtggctcaagaccactgcaccaagatccagtgatccttgctggactagatgtccgatagtggagttgtatgtctttgctcattactcaagctctctccatagtaagacttggggagagggctgggcatcacatttcactagttcatcaaaaatatatattactatatctgtatgtccttggtgaataagtttctgtcttttctgtgctgcccttggatggggtaatgttaataaagttagtctaggggactgccagtactgacaattgctgatcttacatgaatctcacagtcacaaagtatacactgaggtccactttcacagtgatatcaaccaaacaagactatcttattgaactcatgcttggtttattttatgctaatatcatgcttcctgtgtgggcactaattatctatgctacctcaggttgaggcaattgtaggctgacagccaatctaacatatatggggaattgccagtcttagaggatagagaaaacaggattaactggagactgtcaataatgtaagccagagctcaaatctgtccttccatgcacagtcctgccccctctgccacaacaggattaaaggctctgtgtgtggctctggcttgagtaggggcctttcatttctgagtggtgctggtgctcactggtgcaatgatgcaattcaaagtcttctgtcagtttccgtgccctactgtccattgagtacagtttcacactctcaacccacatgggtttgtgtagaggcactgagtcaataatgtactaatgatttacagagtaccagagtcccagtctctaggtattgatttggtgtaaatggttgtgggctctacctggcttctgctctcaatctggaagcctcttggttttgttttttgttttttattttgttttgttttgttttggtttttcgagacagggtttctctgtgtagctttggagcctatcctggcactctctctggagaccaggctggcctcaaactcacagagatccacctgcctctgcctcccgagtgctgggattaaaggtgtgtgccaccaatgcccggctgcctcttggttttaagactcacattaggactcttctgaagaagagtttctatttagtcaaccagtaataatttactttattttatttctgtatgactatggaaagtttaaaccaaaattagatgctgtgttttgtttgtaaatatctcctccaatagttttattcatcactgtattctcattgcatgcactaatcaaagttgacattcaagaatattttgtttcctattgaattgactataattatgtaatttcatctttgtattaactaggtagatccttaaggtttttctttccaatattgggtggtaaattgtgttaaaatatcagcctgtgttctttgaatactatttatactttagaaacttgagatgtgatagattggtggaaaattgaatacagctgctcctgttcatggtagggccatttgtttctggaaaagattagtttcaggtggcctttgaaatgatacatttttatgagaaaacatactatcattatttgaaatgtccttagggaatgttatattaggtgcctccaagacaatcacatctaaagccattcatttaagttagaataatcatctgacaatgcagatagtaatgaaattcagcaacgattgataggatgggtgaagattagccttgcctgtcaaaatggcaaatatgtgataaagaaaactagagtcagtatcaggcaatgtttcaggcttctaatctcatcaacatcacctaaaggggaaggtcatatctgtcaatggagaaaggaagtggcataggaagctgttcttcatgcttgaattagtaatatcaatatagtagcaacaataacttctggaaaatatgatttgtttaagtacacactgtattagttttcatttattggatgcagttataacctgggatcattattttgtttgttacatctcatatccctgaggatgtcatatcaaatcttatttatcatcagatgccatgaggtattttcatagtccagttccacacaatgggcaatgaactaaggattagaaccctattgttttattatgcagcacatattacacaccctttcatagatgaacattttgaatgcaatggctcacttattttcataatatttcctttttaagatttatgttttatgtgtatgagtgtgtggggatgagtgggtatgtgcactatataagtgagggcatcagatgctgtagaactgaagagtatggttatcagagtatggatagatgaactttttccccctttaaacacgtgctttaaactcctatggtttcatgtagagggaattgtagcagagaatcaccatcctcataaccatcaagatttacataaacattctgactctaccctactatacagaggacttcccaggaaaatggcaggggtctgtttaccagaaacagtgtttctgtgggatcagaagaaagcccattttggatcaggtgccctgacactagtccttactccttagcagagttttacaaaagataccaaggcaagtccacacaaggacaccgatgcttgccatttcagcttaacttctctgtactatagacttcaatgaatttcttcttgtctgtcagttctacattgtcctatgaattgatagtaaaacttcaagggaaagtgccatgtacaattacacatctctgaatgtgtatgtgtgtggggggtattgtatgttgtcctacatggggtggtcagagagatttaactactaactgttaccacacaaattcagtgttctcattcccattcattaacttcttcaccatacaagtattaaattggatacctaaaactgtttgcacactattattaatggtagaagaaacagatttgaaagcttggatttgttttttatcaatattttacttactttcaatgggtttttatagtaaatgtacatcatctttatattgcagaagaaactaaatgcattttcagatttagaaaaattttaagaacttaatgtgcacatggagttattaatatagaaaatactatttactctgattagatctgaatattaaaggattcattttaagttaaggtcatttaattaaatgatttattttttcacaatgatatagatttttcaattagtataaaccaattataaaccacaaaaacttgaatatatattttcctttaacatcgtcaaatgaaacatgatatcacatttctacaatttcaattttagcttaaaaatgatcaccacagtgcaaaatagaaaagatttgtttccgtttccagtcttcaaatggaccattaatatctatgataattttataataatcttattatcagcttaagaatgatcactgtataattatatgcttatgataatatcaagatatccatttagtatattgtaaatacttcattataatattatttgctgataatttattttaatagtatcttagaattctgaaattataatcaggaacacgtgcagcctgtgaacttttaaaaaaatacaggaagaatttttagtatattgaatttaaaacaatgtaaacacaaatttttagttactcatttctttagttattaagaaaaaggcaaaaacttctgggtttgactattataatatggtggccatctgaagtgttgattcaatcttatgaattaagcaactataacctttaaaaggtatttatttattaccaacatattttcagaaaaattttatcagttttaaaataaatatttcttctaaataagcaattttcctttggaaaatcattttttatttcctttttcccatttaataataagattttacttttattcctgtgctaaatcattcagaaatattttctaccatgtatgttagacacagtgaagtgtacttgtaaaactcaataatgaagctcattttagaatctaacattcaagctggacagttttacacttaaggattagaataataactggctaaatattaaattttaacctgaatccaaaagtaatcaaaacttcagattcatttaaagaaagggtgcattctggttaatatggtttttgttaattacaagatcattaaggaataactaatgaaatggatgaaatccagcaccctacctttccaaagtaatttaaatctctaatcagagtctgttcccattgctggaggcaaattccaggttcttatttatagctatctgtattctgatatgccatagccttttgtaatcttatgaagtcctacttcctcccctaatgttccttctcataatatattctatagcttcaacttttgatagtaaatgcatgtgcgtagacagaaccacatgaaagaaatgctcctattaagcagatgccactctctaaagaaaaccacttggtaaagttccagatatgggactcagtaatctagaccagtttattattgaactatttttacagtgtcaccttacatagtttgaggctcagcaggggtaaaagcaacaatgctgattttattgctgatctcattgaacaggggtccaacctgtggcagaagataagagcaggagagtcaaaagtaaactgaataaggataaaatgttctattctttatttgagtgtttggaaatctggcatggaatccatattaagttacacccaggacacttccctagaggttgctctgtgtgtgtgtgtgtgtgtgtgtgtgtgtgtgtgtgagagagagagagagagagagagagagagagagagacagagagagagaaaaagagagagagagcagatgccttatggaaaggtattaagcaaaaactgtagatatctcagaaaggaattagcataggccaagtctgtaaactcattccccattcaagtttacttcaaagtgtgagagaaaatattgctttttacaatagttcttgtgtttgtgctgtgttgtttgtgctgttccttttagtgattcagagatgtaatcatttccatgaggcagtagcttccacattgctaggttttggggaatcagggcctggagatgcaaactagtacttattaggcatgccaagctaatgctctatatcctagatatgtcccaatcactaattttgctctcagtctgacttcaatggcaccatcctagtgatcaggataagtcacctaatattattgatttcttattctagggactcaagtcatactttagagatagtcaatgatgccatgtctgtccttgtacttaacaactgtgtggtgcttccattcagaaatacatggacttcagaagcccaatgctagtctttctggcattatttatacttagatatgaatgagaatcagaagctgtatgagattaaagaaagaactctccatttggatgtgacctcaaaagacatggggattttaaaagcaatacagattcttggacctcaccccagatagtctaatttaatgttttgagcacttcttcatgaatgagatgtttcattccattgtgcagagccgaacatgcttctaggaataggtaacattgaaaagccagaaagaaaaataactgactgctcaagaacttaaaaatactccaccacacaggaaataatgcaatgggtggggaggtggagggaaggggcagctagagaagataggaaacagggaactagaagctctagaaggaagaggaacaggcttgtagacagggaaagatagatcctttgatggaaaattatttcattattgattgtattggagaagtggaaataaatgaaattctaaccagtgagtgttagatttttacagggaattacctattcttactcataaaaagtggtttaaaggtcagttcagcttgtgaaagaaatgtataatcatgatataggatttaaaaattatagcttatttatagacacgtacttaggtaatatagtaacttttaaaaataaaattatggtccagtgatatagctcatgaactaaaaacttgtgtcatacagtcctgatgacctgtgtacactctctggaagacacagtgaaagaagagaaccaacttctgaaagttgccctctgacttccacacacaaacatgaaagtgcaagcacacacacacacacacacacacacacacacacacacacacacacacacacgtgaagtatcacaaaataaaaaaaataaaattgtgcagttataagacctcaaatgtgtctgcacttacagactgcagtaaagcaatggtctaatggcgagtaatgaaatatgggggaagactgggttttatgtgacagccacagtcttgattgtgactgttgctcatgcattatgcatttcccacagtaaatagctgtgaataaaaataaacctctgtgagtnnnnnnnnnnnnnnnnnnnnnnnnnnnnnnnnnnnnnnnntccagagttcagagaggagagaacatgggactccaaggaaaaggtatagactaggacaaataaatgtatgtcttgttaaatcatatgaccaacaaggagtaagcaaatgaattattccctggaaatctgaaagaaaatgaactcaaagaaatgcatgatcataccaggggaaatgtgatgtttttatttaaagggcagtacctagaaaattatactcagaatggggaatatattctgatttctccaccatcttgtttaacacattagaaacacccaagattctgttgtattatcttcctcctccaatgctaccaaaatgtttgaaaggaaacagatattactcaagatttggagataggaccctgctttactaaaaactactgaaggtgacactaccacattattaagtttgaaactgtgccatgaaaatgggcctaggccatcaacacatgctactcagggttgccttcagagttttgtttaaggatagccaaatgataccactgagtcatttaaaatagctatgcagagatgtccttgccaatgtatgagtatggtgattagggttttcagtagccatttggacatcatgaggatggctgtgtaagaatgaagtcagtcttacagagcaaacctcagagatggcataggaagactttgatagtacccttgagctaaacttgcttttacctttgtacttcctaattatagaggccaatatatcatcttcattgtctaatgtattttagatgagtttgtctgacacttggaacaaaaccaataaaagagtatgttgatatccaatattggcttttcgagattgggtttctttggaacctatcttggcactcgctttggagaccaggctggcctcaaactcacagagatctgcctgcctctgcctcccaagtaagtgctgggattaaagacatggaccaccaacagaaatagaattcttgattatgacaaagtcactccaaaattacctactggcctttcttctaaaactcctctgtctatttctatgatgaactgttttcatttctagtataatctagcttaactcaaaatttcactaaatcaattaatatatttttcttcttacttattggtttttgagtacaaagtaacatctatgcatattacctgagggctatcacctgctattgcataatcagctgaactattctcttgggagcattctctcagcatttaccgaatttccaaagttcttcattctcggcttgaagctccttgagctttctccctggcacacatccatttgtgccataatattcagatttcatttaggcataatccctaactacattgtaaatatttgaccttatacccagaggtaagtggaatccttagccatcatcaaggaacctactctttgcaacagattgtggtcattatagaaaactacacaattcaaaccatagacttgttggaagcccaaactgatggatacatatatagaaccctcccacaccagaggctcaggaaacactttggaagagaggatagaaagattgtaagagcaatgagacagtgaagtttgctgtgagactgtgtctcctagtaatgtcagagaagctacaccaaaggatgacatcatgtaaacatgatgtaaacacagaagggggaagcccatgagtcctcaaccccacataaagagctacaggcagctaaggaatgctgagaacaagagaaatagtcatccttaggaaagagcataccagctgattattcaataacaaatgctcatccttgaaaacatatacatacaagtaaaattatgtagactgcaaagattgtctttattaatttatgaatactcacacacacacacacacacacacacacacacaaatacaagtaaagaaaaagaggtcatgaatttgaaagacagcagaaggcagggaggtatattagatgttttggggtgaggaaagaaaaggaataaatgatataattataataaaatttcaaaatatttaacaaacaaaacatacaaaaattcagagaacagaggagggcctcggtactgccccaaatgatgtgacagactttgatgatcccccatgggagacctgaccctcctaaggagtggatgggggtgggatggtggagtgaatgggaggtctggaggggagggaactgggaatggtatgcaaaacaagattgcttttaatttaaataaaaattaaataaaaaataaaattgttaaaaaataaataaataaaaacaattcagagagttccaagcatgggcagggaataacttcctatgtgctttttagcaaagcatcaattttctatatgaaatcagggagtatcacgtagtagacaaccacaagctatgaatgaattcatgtagtacttacagtatcattagcaagctaatttataaaatattttgtgtttcctctatgacacataaccacagtcatttaggaccagattttcaataaatacaaaccaaagcaagtaagacaacaacactagttgcattcgttcatttatttaattggtttccatcgctttgacagctttacctactcatatataaaataaattaaaatgggtgcagtagatgctgtgtgtgattctaatttcaaggccggggaagcagaaacagaggaatccttgtgggttcctaaacagctactctagctgaatcagttatctccagattcaatgaaaaatcaattctcaaaaagttaggtgaaggaccaatgagatggctcagaggtcaaagctgctgtctgcacactaaggttgatccatggggtttacatggttaaaggagagaactgaccccttatcattgtactctgacctccacagaacaagcttcggtatctgtgtgcacttacctgcacagaatatgctaaagaatgtgtgtgcatgcaaaaaaaaaaaaaaaaaaaaaaaaaaaaaaaaaaaaaaaaagaaaacaaaagcacaaggcagagagttatttgcagaagccatctaaggttgacctctggcctccatatataggcatgctcacacacacacacacacacacacacacacacacacacacattctttttttcatgaaatacctttaatagaataaagttatttacagttattcaatacttgacctggttcctctgacttccatgagaagagaaagtgtatttgtgaattcttttgtaagttcaaacccccctcaaaacaagaaaatgttaaagaatatggagatagctcgcgtgctatttttagattttcttagtcaataaattaacattatacaactgattattcataattattcatgaaagaaagacatttgatttcggaggaaaagagcaaatgaactctaaagcacatgcaggtacttaccgtcattcataaaatagaggcaagagaataaggagctattgtgactggaaatcacattgtaaaacaaagccttcttaaagtgttccagagaggctgctatcaatttctagtaatgaaannnnnnnnnnnnnnnnnnnnnnnnnnnnnnnnnnnnnnnnntcaatttttttttattttttatttttcgtttgtctgtgcctgttcactgtattttgtccagccaattccatttttctattctatatagacccatagagttggaaactggtaaggtgctcgtctatactccaatatggcatcctggtagtgaaatctatgcctttcctgggatatgctatgtgaatgacccagaaaacaaacaaaaccatacaaccacaaaatctattttaaacattgtttaaaaccaattgattggttaaaatttcctgattgcaaagtttgaaagatcaagaaccaaaattatcccaggctttgtgaagaccactgaacagctcattgcttaggcgacatctttttgatcactaagtgaaactttagcgtgcattaactgagaagtgtacccatttatatcagctcacacttatggatgatgtcagatatttaaagcctacttcagagattcccttgttctgttataaccagcctacttgctaccccatcaaggactttgaaaaatgccttgacatatgactttcttttattctgtgactgtaaaaacttcataaaactacttctgcctgtgaacctgtcatttggtgtaaactgagtccatgttctgtcatgatcatgcatatttatgtcagaataaacactctcattctatctgaggtgaaagttgtggtttcacacaaagatactccttttttcccagtctttgcaatataattggggggtatttggtgggggtgggagaggaagctgttgtctttcctggcactatacattggctccatatgtggatagatcatctgggggacactagggtcatgcttggatgatcattttccagtcatatataggatggaaatattgtttcttggtgatacttgaaaaatctgaagacagatttttagagtcatgagtgagtcaaagaccatgatattccctcttacctttacttactaaagcagctttagtgttgtcaagatttttcctcatttcctttaaggaacttcaaaggaagatgggtaggtcacttgcaaactataggtaccttcattactcaagtgaattgtttagactcacattcatccatttctcttggaaataattactataattactcattatttctaatatgagaatgactgccctaagctaaataaacaagttctgagacaaccattaaattcctgggatttacaaagaaagtgagtggtagggtgttactgtttgagaactggaccacacttgtgccagagaaaatgtcatgtgcaaggaaataaataatcaagccctcccccaccataaattttacatgtataaataatgaaagacaaattctaagtggttttgaaaattaaactcttatgtatttctagaaagctattaatgcttctttaaggaatccacacttctcattgatgttgacaaatttgtcagcatgcagtcatttctctacttacttcaaactttatatctatttcattgagaaactttaacttcctacaataatccactatatgttatagctactggactttatcctactttttaaataacattcatagactttcacgtaatttatttaattcttcacaactcagactgatacttccttctgtaagaatttaaagcagtctcctctccgctgcccccatgtcttcatcagctcatcatcttattgtccttttttgtttgtttgcttgctttttcttatattgagatgtcagctcacaatgtcactcaaactaaactttgctaacacctagcttcatttaatcctcctacttcaggctctggagagactgtaggagcttgtcaacacattcagctatttcagtgaatctgtgtagcactcaccataatgctttgaaattttatttactgtatagactattatttggacaagcagctaacagtaggggtaatactttggaatcatctgaagataattaaagaaaactgaaatccccaagagtttttcatttatgtgtcctgtaatagaactggttccttgaactctctggatatcctaataaacaaatgggcttgaaaaccactgggatttaatcagttctaagaatcaggatctaacacttagcctgtgtagtcaagtggtacttaacactagcacttgagtaaacagtcttgagaatgctgtgttttaatgtttccatagataatcttgatgagtgtctatttacaaaaggctagaaaagatcggcaatattattttctcatttcttctaaaataataggacagaactagcaattgaactaccttaaactgtttataaatagcaataaactgatttcatgaagaaatacacactttaatctagaaagtaaaacataaaaaaacaaagaaattatcactactcctttgaatcaagcgcaagttcaaatatttctttaagttatctagaccataagaacacagccgtcatggacctgctttatgatacatagtagtgaccatgctttatcaaagctgtttttaatgatgttgctcagaatggtttcctcccagatgatgactgagaagctaattaaaaaaaaaatggtgccaagtaccacaagagtaacagaactgtgctgttttctgggattttgttttttttaatttttttgttgatgtttgtatgagagcatgattgataacaatatgctatattttaaaagttgtgagatagaatactttaagtgttctcaaaataaaaatgatgaatatgtgtgatagagcatgttaattggtttaatttagccatgccattgtgaacatactgtattatgtatcataattgtgcatgactttatttatgagctaaataaatggaatggaaaaaaagaatacagccttcatttggttttaaaagaattgaatcttaaaatatgcatgtcaatgcacaaatgtgctatatatattcataaacaaattaataaaatcacactaaagtattcataaaatatatacaacatgtgcatatacccatacacacaatttatatatgtttcattaaatgtgtgtatgtatatgtgtgtttatgttcatgtgagtacaggttcccaaggaggccagaagagagtttcagaacccatgaagttccagatgttttggggcctcatgaagtatgtcccaaggaccaaactcagatccttcagatattctggaaggtcagaaagtgctgtgaccactgaacaatctctccagtacctgctttcatgtgttttgagacaagatgatctctatcagtttgtagcaaacttatagaacaactcatgctgagagtagtccatgggcacagtgctgtctctgagttgggttataacattcaataattaatatctgctttcatggcatattgattatactctgttcagtcccagctggaatttgagtgaaaacactaatttgacttgacataccaatttagaaagttattgaaccagaaatcaatcatccccaatatctacctacttgtgttctactctttgtgatcacagatgtacagcaaccagcgactcttttaatatttttagtaatagaatgcttataaaataaacaggaaattcattttagttatactacataatatactgattcaatattcaatatacaatgaattttttaggattttgtaaatatcaaacactgtttttgagactggtacaatgaaaataggaggaaaaaaataaagaaaatcatctgcccttataatgtatgatataggatccacaatgtttagcaaaggcagttagtcatgtacagaagaattcctggactacttgaggggaaccatagcaatgaagaacattaaaactacataggcaatgcaagtagagacaatcttattttgttggataacatatacaaaggactatattaagaaaatcattgacacctcatgttaaactatgatcattcatagagctctgaattagccttgtcttataatccttttactttccttaacacattgacaaagtacagtggagaagcaactatcctaatgtactctgtctattgcacatgttctcttaatctaaatgtgatagtgtaactcatttgtagtgatttttatagatttgttccttttgtattcagccctatcattttatgcttatgcattcaatcacttgcttataagttgtttattacaactcactactacaatgaatagttttgtttattctaggttacttcttaacatgaagaagccagaccagagtccccacagagggaggcatgatggaaattgaaagtcagttgcttagtgttggaaatgtctgtaatcccagcatccaagagacccaagcaggatggttacttgaagttcaagtacagcatggtataccatcaagctctacactagccagagctacagaataagatcctttctcaaaaaaagaaaatgttcccaatgatagattttcaattggtttctttggaatcatactgactgagctcttaagttctaacactctcaagtatcagtacatcatcaattctcatcttctacacatgagtgcctagttaatataaaacatctgaatggagcacttggatgtatttagggatcctaactggagatacaccatggcagaattagacagttgtgaccattaatgaattatttttcattatcagagaaataactagtgaaagtaaggataggaatacttaaacaaaagttgcaagttaccaatgccactattataaagtagcattagaaaaatacaaattaaccaggcagtggtagctcacacctttcatcccagtactcaggaggcagaaatagggggacctttgtgagttcaagaccagcctggtctacagagtgagttccagaacagccaaggctacatagagaaaccctgtctcaaaaaagaaaaatagaaattaagagtcagtgagatgatacggaattaaagcaaatgtcacaaaagcctgatgacttggtttaactctgagaactcacatagaggataaaggagatggagaatcaactctacaagatatcatgcaccatggttcacatatacatacaaacataaatacattcattcatacatacacactgataaataagtaggcaggtaggtgatagaaatcaattgatcaatcaagtgatcaatcactgtgaattagttcagtaggaagttcagctggaaatattaccgagtgggaaaagaaatataattttaaatcaatgaggctggttattagaagaaaaacactcccagagactttcaatataattccgggaaggaaacatggaaatatccaaagctcaaggcaagtaagcaatgacaactgatcttcttagacttgaaattagaaaataccatctaataattacagaggatataataggcttgcattctcttttaaaatgtcctaaccttctgtctctcgtttggcttgtgaaaggagccggggtcctgttctcttatttgaagagaacacacagaggaaatgccactttggagttctagtgttaaggctgtgctgcacagggtaaatgctacctgggtggagatggatcttgtctccactgggtagccagagatgtgagaaaatgcaaactcaactctgagacacaccaacatgatcaccagtgcttctctgttcactaggaactactgtgatagccaggctaccatcacaaagtatttgcatatgtgtagttaagtagagctttcaagcacttcctactatagttcagattcaaatgtacctatatcaaaggctttgtatttgtttgtttgttctttggtgggtaaaacccagggccctgtcccctgcagacaaattggcctgtagggacagcttaacagttcagagtgtatattggtccaacagaggagctgagcttagttcctggcatttatatcacttagctcacaacagctaaaaactccagctcatggagggactgacaattctgacctcataggtacaggcactcacatgcacaaacttacacacagactcacatgacattaaaaaaaaaaaaaaaaacagtcatccaggcaagtgcttcaccaccagactctgtacccagctcaaatccttggactctaaaaatagttaaactgaatttttaaaacatttaaatatcatccacaagggaaaatagatgtgaaattataaatagctctgctggaaatagctggcattttctaaccctcaaactagatctctgactattgatcactaatgggataaaattagagtgtgtcaaaatctactgagttattttgagagaatataaaggactttctgatctcagttctagagaacatttttcccttgatttttaatatttctttctttatttttgttgttgttggtatttggatccaaggtctttgagcatgccaggcaaatgttctatcatcaagctgtatttcaaaaacctgatgactggagaattactttgagaagaataaaccgatttcaacaaaatttaggaaatagcagaaatgcaatttgatctagatttccatttcagaggaattatgtgataagcttatctagagaaaacatgatttttttgttttgttttgtttttttgtttttgtttttgtttttcgagacagggtttctctgtgtagctttggagcctatcatggtgttcgctctggagaccaggctggcctcgcactcacagagatccgcttgtctctgcctcctgagtgctgggattaaaggtgtatgccaccaacgcctggctgagaaaacacaattttttaaagcacatgttattcagtatgcaaactgatactaattgtttaaaaaatggggaggtattgataaaatgagattaaaaaattatatgactggctttcacctttattactacattctataattaagaattataatgaatgttagccattcagatgaattacaagaggtttccctgacatttgaaatttgatagccagggagagatctgtcttctttcaaattgtctttccattcaacaaatatttatttcttcagggctgcagagatggtttagacagtgaaccttttactatttttgcacaagcatgaaggcatgagtttagattcccagaacctattagatgtcagatggggcactgtgcacctgtaatcccaagattggggaggtagagacaggagacagcttaggtctcagtgggctgtcagcctgggcaaagacttcaaataacgtgaggaaagattgagcaagacgccgaatgttctcctcaagtcttacctgcccacacacgcatgaatgcatgcatgtgcacactcatgcatgtacacacacacacacacacacacacacacacacacacacacacaggaaaaatcctagatattcactgtgggccaagtaacaggtgagccctggattcatggagaacatgtctaaatctttttctactaatcaaatctttcaatgcaaggtttaatatgtaggttcctgtttgcagttgagtggtatctgatccctaccatggaaaggagggcaagtctgattagtcagtgttcagtcttaggaggttaacatgagctgttttgcaagtcatttgcagtcatgtaatctctgcccctgcaagtgagagtcatttgcaaagtagagcagttcttagggttcaagggaccaatcctagtcttctcagggaggtgaggctgcagctctgtggagtcaaattatagcacagcacagcaagaagcaaagtttcattctggaggatttctggacaaggcaagctttctatacacaatgcatggccccatctgtggccttctctcatctttgatttaaatgtaaaacttgtgtcagcacctcaaagacgaccttgaatacttaatatccattacctcaaaataacttttttttttttttttttttttttttgagaaagggcttctctgtattgctttggagcctgtcctgaactcactctgtagaccaggcatgtgccactatggcctgtttttcaaaataacttttctaaagattcctttcctgacttttcatgactgcttttgtttccttcctttggggaaggtggctagacatgacaagttgttgtacccaaagtcacatctctgtccctagattccagttacaaggccacatgtttagcttgactctaatgcccagaaaagacctttatgctaaaatcttttctccaacttggcatttttgagaagctcttatggaatctttaggactacgacatagtggaaaattctacttcactaaaataaagtttctttttaaaattaaatatctatgaggaaataaaagtttagtagtggtattaaaaacaatcagctacatttgtgagatttgctatgaagtggggagtaaaaagtatatggtggacagatagcaccagggagaagttaggcatggctacacctaggacacagctgacatctgactgccagaggaaggaaagaatctgaggagctttatgaaggtcttgatgcatttgcttaggcatgtgacagcatttcagacttattagataaacaaaaattgatattttttattatttctgggctaagaaaaatctcagcctacagtacactagcttgataaggaagagtcaagttcatatacataatacattaccttcaggtgggttccctcctgccttccagtaaacagtgtcagttttctgtttttaaaattgatttagaaacagtcaaggattagctttcacacacacaaacacaaacacacatagacacacactcacacacacacttactttgtgtttgtgtttcaactttgacccaatagcatgtatgactcagttttctatcactgtatacaatatctgagataataattttataaagataaaggtgttgtttggagccatgatttgggaagatacagtgtatggtgagttgtcactattgtttttagacttgtagaaaaatcactaatcactgcagagaccttgttgtataccatgcagcagccaggatgtgataaaagggaaagaaaggaacttgagttcagccccaccctgtccctcctctgggaggaaggaatcttggctctcttcatcactaatgccactctacctattaaagcagttgttagcagatggagatttttagtaaatatctaacctagcagatatagatactcaatgcaagtattgtgaataaatgaactcatatatattttataatgggaaaaagaccatgtactatgtggttctgaaaaacctgaattctcacttcatttgtacaattctctgtgtaagttttcacagacaaactcctgttttctcaattatgttctgagataatttattaaagcatttactaagatgttcatagaacatttatatccatacttacctgacaaacaaaaatattagctaagaggagtttccaattccagcataatttgaaagaacatgcaattgtgaaatccttcacccttctgtggataagcagactatcctagtgatgaccaggaaaccatgtaattcagtcaggatcaagtggacctcagaatttgcacattgctgtaggtgacccaagcagttgccattacctcagcctgagtggacatgagacagggccttcctccgtcagtccttggccattccttttccttaaagaagacttcatcatattctcaggataaattgtctgttcttttgaagttgtctaaatatcttctgccctttttccattttaggacctgatgttgtctttattccagacacatgctttctgaaatgcctcaatcaaggaaggtggcatctccatttggaaactgtgggagagcaggatcctaattgtcctggatatttgaaagagctggtacaatttcagataaaaaatcctgtgtcagttgaaaactatgcccttgagagccaattccttcctaaggccagtcagtgatttcaaggtagccacactattgctgaatatttgccctacctcaggcatcctgtgagttcaatttctgatcctcactgaaatttccctaataattgaagggttttcttttggggttttgcttctttgatttggtctgatacatttatttactttgagaacacatataactagaaggaatttaataaaaagggtagtagaaacaagttattttgtgccagaagtactcatttcactgagaacaacaaaaatcagcacttttgagagttatatatgtaaagacttccacacagactatgtctggcatagtgtaagtatagattaattattaactaatttaataaaataaatcaaacaacagcatgtgaacatctattaaatttgactgtttggggaaatgaagataaagcttatgttctcaaaatcatttgaaagttaaagtaactctgagcatttagaactaatacagtgatgtgtgcttcttcttctttagtctgagcatccccagcagaatcctcaagggtatgctagagtgacccaagaaaaatgaagttgttacaattactctgacttgattgatacaagggactgtgggagtagtaaaatggataacaacaaaattaattagttttctgttcatctgatttgcacaacaatatcattgtcatcttagttttgtaagtattttggtctcatcaaaatcccttgaagaacagctataaaagacaacctcacaaggtctgtctcaactttctgtcagcaggtgccagagggatacaggaaagggaacattaagaatccagagagagtcttgtcacgttcagttttttacatcagtgttattacaatagaccctttgaaatctttgtatttactttttcatgttataatttataattttcagtttcatcatataacatttctattaattctttgagacttttataaatgcttgcaatgttttctttgtttgtatttattctttgagattttgatgcaaaatattttgatcattctctttcttctcctccaacctttgctagattctccctgctctatactcacctatcttcatgttctttctctcaaaaacaaaacatcacacacacacacacacacacacacacacacacacacacacacagagnnnnnnnnnnnnnnnnnnnnnnnnnnnnnnnnnnnnagagagagagagagagagagagagagagagaggctgctgccctagagttggaagtggtaaacaaggaaaccgttttccatacataacagaggtatgaacacatgaatccacagactttgacagcatgaacaagacagacctaagctcaagccaaacaaccccctagcaaggagaagggaagtggaaacagtggcacaatgttctagccttagcggaacacatacatgcacacagtgtttcttactcatgtccatctacaattccttcccctaacttcttccaggtctacccctcacccagctaccacttccccccttcacaccccatactttcttgctctctcttaagtatcccacagagtttgatttgtgccatagagatatgcatgggtgtgaggccacccactgtcaacctgccaggtatagctttaaggaaaatggtggaggtgcacccctgtaatcccaacactggggaggcaggtgaatctccgtgagttccaggacagctattacacagagaaaccctctcatgaacaaccaaaaggaaaaaaaaaaaaaggaaagctaattccaatgccagagctctctaatggtatatactgtgattattacccaccaactcccagtaatttctcttttccttgaaatgtgtcagcttgggatgtgcatagcgaggaattagtgtcaagccattcaaatttgtccataaattcctctacttttaagtttttgtttttgagtttttttcctgtgttgacagagaataaactgtcagctgtagaaccgtggacaatgttacttacattgatttataagaatccccatcttaaacttctcatattaacttcacaaatctttcacacaaacaaaattgtcactcagaactccaggtaagaactctttctcctcacttgcagtgacatatgatagctgtatgctaattcatagcctatacaatattctcccaatactagagagaaactatataagaaaagaatctattcccggatattttaactccactttcagggcaaaacccacatttgtagagtctcttgctaggcaaggctacaattaaatacttttttgcatgtttcagttttcaaaaagtttgaaactatttaaagttcgtgactaggttttctaatgtcctgctttggtgttgtcacctagcataatgatgaattgtgtgtcagtgttcagagagaaccgctgtgctcagtgacaagcctggctctatagcacagcaactgcaatgcgttggctatttctctgctcactgtgcttaaatttcaggcgattaaatccttaaaaagcatttcagcattgtgtgattcagtcttgtcaggtaattttaaagctttagaagcattatgccataaaacattttagtatctttgattttatcatatctcaaacaaattatctctccagtatataaatattgcacatctaggatgggccccatctatcaatattacactgtgacagcatgcagatgcttcttatcagccacgccaaggaatttggtgtttgtcactaagcaatattcagaagcaagctttccctttcttttattatgcaaaatgcattcaagaccagaaagggacacagagaaaattactcgtctgctaagatattttgacacagaaaaatctttcttcctcaaggatgaaaagcaccttgtcactcacttctaattgctgcctgctttctgtgagtgcagggaagccagtgccctgtgatgtcacaagtaatagaaagcatgaatggctatggacagtattgtagacatcagccaggtctgagtctctcaaggcagaggtgatttttaattgcaactattaattttctttaagaagaaaagaggacattttctcttcagcatctctgctatttcatctttgtgtcaatagagacctttcttctcaaatgcctgtggcattaaagcataatgattgcccacattttcaaggcacgaatcaatctgaagagctgtaaacttaataaacattcaaataaagcatttccttgtgattaacaaccctaaccaaacgcaccaggcagggatgaagtttgtgaaggctgaacagcaagatgtgaaatcactctctaggtgtggaaacaacttttgaaaacaaaaatcctggtcaggagcttatgagaaaaagttcccacagaggggatcaggaaacagtggtggcatgacattactcatgtgccattatctctgaggtttccagtcattcccttcttccttgagtgaaggggccagagcctctctggtgaaatgtgtcttaatgatgaagttgaatgggttgggggacctccgagatttcccttggaaaattgtagttgattatgctgttaccgaaactttctctactattctctcccttccttttactttgaaggagaagcctaagaaaaatatccctaataaatccaaggaataacagaaggatggtaggcaagcttgcagttatcttgttgtcaattgttgaccagtcatttttatctcaagtacattgtgatacatttatttgtgtcttttaaaatgcataatatattcactcaataacttatatggatgtgtgcgtatgtgctnnnnnnnnnnnnnnnnnggaaagaaagaagaagaaagagagagagagagagagagagagagaatgcctactggaaacatcaagaattggaaacaggtgacaggtgtattcttaagaagcaggcagtattccacaatggatctcattaatctagaaattgcatgagagctaagccttggataacaatcagtttcgggcaccagaaggacatttttggtagttaccaattttggataccagaaagaaggatgtttaataggaaatttggagtggaaagatgaatgggaaagatcacttttgctcaagaccactcccatagagtatttaaactgtcccccagaaaacagactcctgattttctgatctctttcctgtctcctctctggggagatggaaggccatcaggagccttgtgtccattaaaaatgggctatttctaactcagtttgatttggtctgatttggattgctgcataggtgaagaggcttatcagtgtgcagaaacttttcatctggaggttccaccaagggggatgtttccctagggccatgtggtgggaaaacacccttctcgccctcacctgctctccaaaaggctaagattggcttttgactcagtaagtgtcctttccaaatcattgccttagaggcccagggcctcctgtgattttcagggtatcctgccaaagatgcagctgggccaggcccctgacctgttactgggacaaggacctgccttgtccagtgggaacccttcttcagaatacattctgttcaagggaatatcccacatcccctctctttttgacccaggacctaccacagtggatgcattgcattaggggtagggttccaccatagacttgtgaaatgggtacatgtcattcaaagccatatccccaaatgcccttgggctaccttttaaaaaatctttttaaattggggctatctgaaaccatatgtcgcaaatgcctgatttctctgtgcactaatgcctagcctcaatatgcccttgacaatgggacacaatggccaccagggggaaattctgaattttccatcctctgtgatcttgaaagtttttgctgttgtgggtatcagtgaacaaaacccccatatgtccacagtttctggatactgtgctcccacccttcccctagccagtgacttacagcaacagtcttattgactagagtcaaagtgcctccagattcctgactgtctgggaactggaaccctgaaaattcctacctgacattgatcccctacctgccaaccctgccagcccaaccccttccaatggggccatgccacatattccattcagtggctcccattcctcccattccttccctatccacctcttcccccttgcttactctccaggacaaaggtcgagtaacaacttccccctctttccccaccttcctctctttcccctccccttatcatccctccctatcatttcatgaccttcttgttcccttctacacattggcctatacttgacctagtgtccccagtgggagccatagtcctagccacccatttcatttctcaatcagtgccagatattagaaagcaatttaagaaaaatttgaggaggagtccccaaactcccatactggaattggtgaaaatggcttttaaaattttcagtgcctgagaagaggcaattagttgagttcttcagacagataaggccatgctctgagcctaagccttagcagcttccctgaggccacaaggggtataagggaagtcaacagtctccatcttgctggagctcaacccaagtcaactctgccattaacctgctacaaatgggagcagaatggtcacttggcaagatcttgcctggaccctcagccaccaaccaggtcatgccctggctgctctcaacctggacactggaaatcagagtgcccctgtgtgggctcatgctgtataccatgccatggaggttcagcctcaccaacactggcagttgagactgtgccagcctttgaactactcagcctggcagaggactgatgtggcccaaacttggtgactgtcattgccgtctctgagtctaggataacactacaggtagtgggtaagtctactacttttcttttggacatggagctacctactctgttttgacctctcattcgggtcctacagttccctctccaattcctgtcatagggatgaatgggaccccctctttcccatttcagaaaacctgggactgctttagctgaaaaagttgtcttacttctgctcatctacttatccctctcagatctgatggtttttgatgattagggtactgatagtcttgtgcccaaattctgaacccctaaatcaccaagaaacccattccgatgcaaaagcaaagagtcttattgttcaacgagttaagtgtcttagctctattccctcttccatccaaaacagcgattggcctgagaaggacccaaaggggccttgaggcagagaatttattagggagagcaatgggagtgtctagaggtactcaacagtctcagaactggtgcacatctagggttgggtgacctgtcttgtgttgattgctcaactggtttttctggcctgtaggccgtcccagggctatgctctgcatgtcactgttatgccagttttaccataaaacatgtccagagcctgccaactaacttcctattggttccttgccacatggaaggtatctcaccttttcgtgactagggcaggtctggcaaggtcaggcatgtgctgtgtcagaattctacatcttgctgggtcttttctgcagtttgtcatggctgctgaagcagggggctgggtgagggtctggtcccttcagtagctcattagttcattaagtttcatgctaaaagtacagacatgtgtgactctttttacaggcttcatagtcagggattaacaggtttcagatctaacttcagatgttcagagttttaaatatcctgattgtcttctgaaaatgctcatgccttttaacctaaagccatagccttttgctatgacagcaagatgcaaatttgtgttgaagggaccaactccccatttcgtgttagctggtggtggtatgctttacggctctgcacacagcaatgacacacagagcatagcaaccaccctgagagggcctatgggccataaaaaccagttgaccaatcaacacaggacaaaccttccaagcctggaggcacaccaatcctgggcctgtgcatacacctagacactccccttaagatctgtatgcagctgcttcgaactgtcttttgtagccatctgccttggtggatggatgaaagaccagagctaacatagggttagctcattaaacaataaagcctcatgcagtttgcatcaagctttagactcagcctggtgattggggtgaccacagtcctgggctaagatcctggaagcctgagctttctggaggtcttacagtttcagttgtctcacagatatctgcaatttcctgggagaagttctgcttctgtatcaagaaatagggtctggtgaaaactaaaaagaccccacccatttctgagtatatcttgcaggttcactccccctgcctgggctaatttcaacctacagagggtcctccagaaaatgccagcacttgtaccagcacatgggactttgtcactggtagcacctctccaggcttaagtgaatggaaacctacccaacaactggaatctggttttcaaatatggcccaagaaagggcatatctgctctcgagtctcactcatttacccttgcttctttgtacaaccaggacacttctctgtctcttcattctcgcagttgtcaaccttcccatggttcatagtactaacagtaacaatacattttctcctagcaacctgctttctccacctcaaggaacagatgcctgaggtttcctggatggcattaactagatgcttctttacccacacctcctgctgatcatgaacccaccaacttctgactcccccatcccccacatcatcccttgtcagcagnnnnnnnnnnaagaagccagacatgaaccagcgtccatatacccaaagagtctggggtgttatggtggaagcttcaccccaatattctgtaatgggatgtctggtcccctaagaaagactttttcgcaaggtcaggtatttagacaaaagcccccatcttttcaggggcttaaagaaagttcctactttctaaaaaggcagacattcttatctttggcaagaggaatttgtagtcattcattaacatacgactggggcatattaacttgtcaaggccaatgctagcttcctcaattcctgttctcaagccacacctgagctcacatgccccttgtctcccatttaatcctatgtgcaactatacagtataaaaggtgcattcatctttcaataaatgcacaggcagccatccaggtcaccctcatatcatgtcagcattccccacctaactccacatttaatctttgggacctgaaccctgccaaagcaagtctctagcaatgtgtaattcaccacattagattaacaccctgactgaaactttcaaaaccattttggctattttttaaaaaatgtgtatgcatgtgtactctgtatagagatgtgtatatgtttacatgtgtgcatatatgttcttgtatgtggacactagaggttatcccattatttctccttagtttgttctttgagagtgggtctctcaataaactcaataaactcagaacttacagatttgctaagctacctggctagtgaactctgaggatctgactgccctgaatctccagtgttagtattacagatgtgcatggacatagcatacttctaatagattcaggcatctgaagttaagatcttatgcttgagtggcagggcagccacttacagactgaacctttttcacagctcttacctgcctaatctaaagggagagatttgtaggggtggaaaagctctcttcttcaccttcctaatcaatctcagcatctcttccatggtctctgttttgaaaaacttcactactataaccaagggtttaaacatgtgaccagggaaagtagcttgttgaacggggtgaaacttttcaccaaatctttatgttttgacacagtggacactagtgagggtgtcatgttatgttgggcgatgcttgcaactggactgaatgactgagaaaagaggctaggttttaccctaatctgcatgctcagtcagttcttttactcccgcttgtgaattccacatgagggtctgttcttgtgacagccagaggtacatgttaagttttaattgctatgcctaagagatccatgaaacagaaatgcctctgatcttcaagcctcttgcccaaggacagatacttcctgaaatgctggaggctattatttatgggagataacatgccacatgttttcactaccctaaataagatagtttgacccttggccaggcgttggtggtgcacgcctttaatcccagcactcggaaggcagaggcaggcgattctctgtgagttccaggccagcctggtctccaaagcgagtgccaggataggctccaaagctacacagagaaaccctgtctcgaaaaaccaaaccaaaccaaaacaaaacaaaaaaagatagtttgacccatctgcacctgatgtgcttgatcacatgtcagcaggagattcataggcaggaaatatattaggatgaactgttaccacccaggcaaacacaaacttggtccttattcataatgtgtacccttgccctgatttggatgtaggctgaaagtatgtttggatgtatgtatacccctgattggacatgatagaaaatacctaagatactgaaaactactattcaggccatttttctgggaaacaaggtatgaatttgaccaaagagcccatctacctggccagattttaattaaagcttgctttgaatttggctttaatttgtggtagtgatcttattctctactggtaggattaacagtctnnnnnnnnnnnnnnnnnnnnnnnnnnnnnnnnnttatgtgagaacattaaaaaatattgtgtgttcctcaatgaggaaaatatgctaaatatactttagataagcttggaaattcacatttgatgctaatcctataaacattggagaaccatatgaaaagaatttattagtgctgtaaactttgttacttcagtaagttaagttaatataacatgatgatacttctgagctttgcaaataagcaatctaatttagttaaagctatctaattaggaaataaaaacaattagcacattaattaaagtcttaattcacactaactttttaacttactaatactgcatcattcatactacccactgttattttgttttctatcccctgcccccatcctttcacatgtacacttgcttgatactttaaaatactaagtaattctatggttgtttagtaagcccaataaactgggagtttataaaaataaagtcttctattatatttaaatcattttataactgtaatttcagttatttctcaaatgactgaggaaaaatgaattccctttgtgtgtttcaaagaaagactagagatggggagtggtggcagtgggcatcgagctgaattaatagctcagcaattcagagcattgctgctcttgcagaggactcaagtttcagttctcagcacccatatggaggcttgcaacccactgtacttccagttccaggtgatcttagatcctttctggtctcagaaggtatcaatcacaaatgtggtacacagatatatattcaagcaaaatattcataaaataaataagtctttattaaataatttaatcttaaatatcagaatgcagatagatgtcaatatgatcaagcttatcttgtgttcagagacatttgtttcctatgtgtgtctttttgttaattcctttttgttcatttcttttttcctttattttacatactgatgacactttccccttcctcctactctcccattccctctcctccccacctcccatcaacattctccccatctcctcctcctgcataatctccattcagaaaagcctgcctaatatctttgtgatactgatgtagaccttggccacagaatttgccttgacctataaaccacaatcaagaaagatttggctaattcataggaaatatttaaaaaaaaatcctttgagtgccctctttcttcatgttccaaagactcagtgttatgatccattgtcacttccggggataatagaaagttgctcttagtctgcatttaggctgctcctgcagcctagcacctcagctccaagacttgtgagtattcaataagcaataactgtaacattgtttcttattttggagcatatgatattaaaagctgactaaaagcatatactttctcttatacttacagctttatgtcatttacatatttacttgacaagaaaatttgttaataataaagaataaacatctagggaaacaataacctaactccatggaagcattatataattcatataaaatactgatataaagaaatgataggcactccttaccagtctgcctgaaggtaggtgacagacatgcttccagggtgtgccctgactcctgccacccagtagacattgtcccaacaagacccataccaccacccaacttcatgtaccttaatattctccctgtggccaaccctcctgtgcaaccccagcagactacataggcacaggcacaaatgacactacttgcaaattcaggcacaggtcaaaacaacaacagttggaagatcaggcacaggcacaagccacaccatttggaataacagatgagtaaataccactgtaagaatatattcaacaactgaaagagcaatgtggcaccaccagaacccagtgatcctacaatagcaaaacttgaacattctaatgcaactgaaacacaagaaatcaaactttaatttatctaggtgataaaggctcttaaagaggaaatgaagaactcttttaaagaagtcaaggaaaagacaaaaaattagaagaaaataatgtagtccttaaagaaagaaaagaaaaaaacaattaaaaaggtgaatagaatggttcaagaattgaaagctgaaatagaaacaataaggaaaacataaactgtggaaattctagaaataaataaatctgggtacatgaacaggaacaacaaatgcaagcatcaccaacataatacaaaagatagaagacagaagctcaggcatttaagatacaatggaggaatacacaaaatatccaggaaatctgggataccatgaaaagactagacaagagaatactaggattcaaagaaggagaagaatccaaactcaaaggcacagaaaatatattcaacaaaatcttagaagagaactttcccaacctaaagaaggacatgtctataaacactaaacagaaaacatacagaataaagaaagcatttttaagagctacaaaggaaaaagattaaaaaaaatcctataaagggaaacccatgagaattataaaggatttctccatggagacttaatagtcagaaggtcctggacagacattttacagatcctatgggaccatgatgccagcacagactactatatccagcaaaattttcaatcaacatagccatagaaaacaaggtatttcatgacaataccagatttaaaagatacctatccagaaatccagtaccacgaaaatactagaaggaaaattccaaactaaggaactcagttacatccatgaaaacacaggcaaaggataatctcacaccagcaaaacccaaagaagggaaacatacacactactatcactatcacagaaaacaaaacaaaaaaataaaggaattgacaatcaatggactcagttcatcaataaaaaggcacaagctaacagaatggatatgaaaacagatctatccttcttctgaatacaagaaaacaatgcagagaatcaatgaaacaaagagttggttctctgagaatatcattaagatagacaaacccttattcaaactaccaaaaaggcatacagagaatatccaaattaacataataagaaagggaaaggggggcataacaatggaaattgagaaatttcagagaatcattaggtcatgcttcagaaaacctgtactccccaaaattggaaaatctaaaaggaatggacaactttcttgataggtatctcatcccaaaattaaatcaagaccagataaacaatttaaacacacataaaacgcccaaggaaagaaaaacagtcattaaaattctcccaacaaaaagaagcccagggctagatggtttcagcacagaactctatcaaaatttcaaagaagagctaatataaatagtcctcaaattcttctgcacaatagaaacagaatattgtcagtttctttctatgaggccacagttaccctgatacccaaaccaaacagatgcaacaaaaaaagagaattacagatcagtccctttcacgaacattgatacaaaaatactcaacaaaatactggcaaaccaaatccaaaagcataaccaaaaaataatcatccaccatgaacaagtagacttcattgaagagatgcaaggatggttcaacatataaacaaacttaaagaacaaaaccatatgattatctcattagacactgaaacatcttttgacaaaatccaacactccttcaaggtaaaatttatggagagaagaaggattaaaggaacctacctaaacatataaaggtaatatacagaaagccaacaaataacattaaatcaaacagagagaaagtcaaagttattccatgaaaatcaggtacaagacaagagtgtacactctctctgtatctattcattatagcatttgaggttccagctagagcaataagacaacaaaaggagatcaagtggatacaatttggaaaataagaaatcaaactttcactacttgtagatactttatgatagtatgcgttatgagcattcttccctccagcttgggcccagagtcacatcagccccaaatgaacatgcaagaattatattagctataatactgttgaccattggcttgcacttcttattagctagctctgtcttaattattaacttatttctattaatctaagtatttccccatggacttatcttactggagaaagggtccgggtctcttagtcctttgcatgctgcatcttgactgactctgcctatgtttccagaatcctccttatcttctagtcccacctatcattctgcctcattggccacagtgctttctttatttttcaaacaataagagaaacatatatacagatgacatcaccatcaagtatacataagtgacctcaaaaatcctactagggaattcctacatgtaaaaaaacaaaacaaaacaaacaaaaactccattaatgtggctggttacaagagtacctgaaaaaaatcagtagacctcccatatagaaatgctaaagtgactgagaaatcagagaaacaacactttttacaatagctacaaataatacaaaatgtcttggggtaactctaacaaaaccagtgaaagatctatatgacaagaattttaagtctctgaagaaagatattggagaagagatcaaaaaatggaaagatcagtcccatgctggtatcccaggcatcagtctggggaccaagagctccccgttgttcaggtcagctgtttctgtgggtttcaccagcctggtctggacccctgtgcacatcactcatccttctctgcaactagattcctgttgagttcagtggttagttgtgggtgtctgcttctacttccaccagctgctggatgaaggctataggatggcatataagtcagtcatcgatctcattatcaggggagggaatttaggccatgtcccaaagaatatgatagactctgatgaccccctatggaaggcctcaccctccctggggagcagaaaggatatgtgataggtagggtattattagttgggggtgtgtgtggtaggggaggagggaagggagtgggaactgggattgacatgtaaaacaatcttgtttctaattcaaataaaaaaataaagtataaaaaaagagaaaaatggaaagatctcccctgctcacaaatcagtaggattaacatagtaaaaatggcaattttaccaaaagcaatctacagattcagtacaatcctcatcaaataccaacacaattcttcacagacctcagaaaaacaatacttaacttcatgtggaaaaacaacaacaacaacaaaaaaaaaaccagaatagctaaaacaattctatataataaaggaacttcccaaggcatcactgtctctgacttcaagctctattggaaagctataataataaaaacagtttgatatattttcataaaaacagataggtggattcaaggaatagaatcaaagacactgacataaacccacacatttattaacacctgatttttgacaaagaagccaaaagtataaattggaaaaaagaaagtatcttcaataaatgttgctggcataactggatggcagcatgtagaaggttgcagatagatccatagctatgaccctgcacaaaactcaagtccaagtagatgaaagaccttaacataaatccagttacactgaagctgatagaagagaaagtgggaaatagccttgaatgcactggcagagcagactatccctgaatataacatcagtagcacagacgacagtgatggacaataaacaggacctcctgaagctgaaaatcttctctaagacaaaggatacattcaataagacacaaggcagactacagaatgggaaaagttcttcgccaaccccacatctgatagaggaccagtctccatcatatataaagaactcaagaaactagacatcgaattatcaaataattgtattaaaatggggtactggtttaaacagagaattctcaatagaagaatctggaatggctgaggtacactgaaagaagtgttcagtatccttcactaacagtgaaatacaaatcaaaataatcttgagataacctaatcttaaaactgtcacagtggccaagatcaaaaatactactgacagcataagttggagaggatatatggtggagtaaagggaacactcctccactattgatgggagtgcaaacttgtacagccaatttggaaatcagtatgaaaatttctcagaaaattgggaatcaatcaacctcatgatccagtgataccacttttttgcatatacccaaaatatgctccaccataccccaagggcacttgcttagctatgttcgaagtcacataattcataatagtcagaccctggaaacaacttagatgcccctcaaatgaagaatggataaagaaaatttagtatatccacacaatggattattactcagctgtaaaaaaacaactacattatgaaatttgcagacaaatggatggaactataaaacattatcttattgaggtaaaccatgcccagaaagacaaacatggtatgtacttgtagcatgataaataaaaagactcagacactgatattgggtttcaagcttcaagttgaagatcagaaaagtaaaacagccaccactagctcttactctacctcagactgaaaagtgatcctggctccaccaaatttcagactactattccgcactgctatgttctcctcaacacggctagagaattctgacacttactactgaagaccctgtacctatctagtgctaggattaaagggatgagctctgttactcttttagactgattccaccttgtatagccctgtgtggccttgaactaagagagatccatttgcttttctcttctgagtcttggaattaaaattgtgcactaccactgtctgatctctatagcttgaggcaagctttgagaaatcataaacaatatattatcacacatactccctataagtggatattagacatacagcaaaggaaaaacaggttataatcatcagccccagagaagctatgtaacaaggaggacccttagagggacacatggatctccctagaaagaggaagtagatttaaaataaaatacccagaagtgagaaaaatatatgcatagtacacaaatataaatagcttgtaaattgttttatatgcaaatcacatacatatatatgtatatatgcaaaactgtatatatatttggttagattatctgcattatagaacatttgaacaaataaagtagcataattaaatttggacaaaagacttgagtaaatacaaatgaaaggtaatatatgaatattgaggaaacacatgcaaaatgttgagcaccagtaatctttggagaaatgtcaatgaaaccatggtgagccctatcccacatccaccaggatagctgttacagaaaaagaaataaagaaaactataaacccactgaactttttataaaataaacaatgaatttatttcttagtacaaatacatgttaaatgtttaagaaaatagatacccaattactccaatcagattattatacaggatacacacatactgaattgtaacacctactaaatatatgctgatatgatcaataaaaactagaaagcagaataatgctaccaccaagcaggattgttcacagatggaagcagatccattttaatgatacccgggtacatgtaaaatgataaatcctgaaacttactgtggtagtttgaatataattgaccctcgtaatcttatatagagtggcactcttaggaggtgtgactttgttggagtgagtattgccttattgaagggagtgtgtcaactatgcagcaggctttgagatattttatgctcagatactacccagtgtcccagtccatttctgattgtcttctgataaagatgcagctagtaccatgtctgcctacatgctggcatgctccctgacatgatgataaaggactgaacctgtgaaactgtaagccagccaccccaattaaatgttttcttcataattgtcatggttgtgttgtctcttcactagaaaaatcaatttcataaagatcatagctctaaatgtaaatacaaaaataagatttcagaaatatatatattatatgacaataaatataatatatatttcatatatatatgtatatatatatttcaggattaatatgaaaatctcacatattgatagtaagtgtctgagtagctcaggaactctgagtaatacttgtattatattatccacaagcaaaatgcaagtaggtcctcatatattaatgcttacagcagtcaaaaggtagggactatccatatattcttcaaaggatgagtacataacaaaactcatacatttataggtacaatacaaagatacatacacacacatgcacacacacattttaatctttaatagaaataaaaatttttgtactttatacgacattggagaaatttggagcaattacgtcagacgatgaaagttgtcacctgagaataatcactacctacttctatataatctgctaaaagctacagaaaataaacacattctgagggcatagcataaatcagaaatgagcaggtgagaagaggaagcagggctgtttagtttctgttttgaataacagaattctgaaatagcattgataggaatacaacaccatggtgaatttaatgtcataaattttatgtgtgaaatcatcaaattgttaagttttgaatatgcataaaattcattgcacatgcaaaacaaaaagaagacaaatctatgaggtgatcaaagcatggttctagttatccattttgcaatattatattctggatactgtattaggcatggaatgatcttatccaatagcctactggtagcaggaacaagatagaggaattctgaagtgaatttaagaaatgaaaaaaaaaatactccaatgtcctgagcattaaagatggatctgcagatgcttgaaaaagaaatacaaagtttctattttttgagtattttttaataagtgtttgtgactgtgctgatgacaaaaatgtggaaataatggccactctgaggaggtctcagatggaagtgaggacacatgagaaaatgtgatacttataaggatagttgagggttgcgttctggggatgaaacccaggccagctcttttatttttaattttgagacatggtcccagtaagttgttcaggtcagctttgaacccattctgtagcccatgcaggccttgattttacactttgtcttcatctttatgaacagttgctatcataggcctacaccaccagttggatgatccttgctgttacgtggtaaagacattactgagtggtgttccgtcataactttcaatgggatggaggagtttggtatgatgagttggcctatttttgggtaaaatcacataaatatttaaggttgtattatagtttctcttagcttcagatagtgaaataaaggacagagagagagagagagagagagagagagagagagagagagagagagagaagaaactgaactccaaacaaaaaaggaaataggacttaaagtatgcaaacttctagtcatggtcatattgagaataatgttattggttagaacattaaagctatgatcaaaccaacattgaataatgatataggtctggttacatgagactgctgtcagtcatctattgtgggaaattaccaatacggagtcaggtagaaatataagggtatttaatagggaaaagctacctagccagctggtgtggtagaggtctgtacagcaagatgcaaagagaaaccgaaaccgaaaacgcagtcccactacgtcactctgaccacgccctcacaagcctggtcaggcacacctgtagccagcccctaagaaggcgtggctacagttttccttccattcatcaacaatggaaaaatggtccccaagatattttgagactttaatgaagggacactccctcccctgattactgccagacatgccaagcttcagggtagacctatgctctaccttgctggtgcaggtgcagctccacagagcagaaggtgcagtgaaggacagtaactgttaattctactatgctgagaaatacctagttaagtgcctttgtaggtatgtctgtgtagtgacatattatttatggttaattaaagcctacctgaagattcagaaagcagtcagccacaagctatagaaaccaagcacacacctttaatcctagcaaccagaagctaagagttggtggtacatacttttaatcctaggactcaggattaagaggcagacagatctctgtgagtccaaggccatcaagatctacacaagattaaatcagtctaaaagaaattatagtttgcacctttaatcccaggactcatgagaggtacataagtcagtatcaggattcagtataaggcattcattctccagacacactgaggacacattacagtctgagaggcttggtgagaatttttggagacaggataatcccattcagcctaacgtagaggtaagaagctagtggccagctgctttgctttcctgatattagcttgaagcttgaaccccaataccagtctctgggtcatttattttttgtgttacatgactgtgatggcatttccagagtggttaaccaagagggagaagccccatccaaatgtgaggagacctgctggaataaagcagaagacattcttcagtattggcatgtccctggccatccttggggcaatagtgtccacaaccctttcctaccacatcatagtctcagtacaatcccaaagcaatggttctagctaaccatggtctcaaacctcttaagtagcaagcaagaaaataaaaagaacatttcttcctcagtttagtctctctggtatctcaaagcattggaaaatttgactaggccaaggggctcagctatatgtgtacattgacatcttcctggctgtgctcagtgttagaactttgtgagcatggctctccccacctttattccaaaggatatcccacataaccttgggttgaaaatagctattgagccacatcagggaaattctccaagtttatgaccagcatagccaaccctactaccacagcaagaactcaagcctgagagacacaaaggcaggcagttgtgatccatgagagatgccatagagactaccagtcaccaaactataaagtagggctgcctgaagaacacaggcatggatacatgccagcatgccttcaaggagggtcatgtagttgagaagaggataaggttgccctgttagaaagtagacacccttgggtcagtgactgcccaccctctgcccccccgactctcccacacccatatgactttgtgctcctggttccttcagaacagggctgtcttctctatgctagtcacataagctcattatccaagagcacagaagaaagcaccaagcaggaactaagaacagtttctgcagcagagaatagaagatctggaagcttggcttcataggctcacaatcgcctttatggctccttttgacacttttgggctcctgggcttgtgatgggtttggctactttctggcattccttgagcaataggagtcttaaaggttgggtctgtgttattatttaggggccaggtatttcttttaatgtcgtaatagatttgcagatatgtgacaaggaggctttgtattggtcagtgactatagagatgatgtaggaaatgtagtgaagtcacaagaacaggtatttccaaaaggaggctatgttctgttcatggtggcctcactaggcattctacacccccagtctgtaattcccaatgccctgacacttgggctgatgtaatcatgtgtatgtctgtgggtatgctttcaagcttgcaaaggctggtgtgtgtgtgtgtgtgtgtgtgtgtgtgtgtgtgtgtgtgcatgtttaactgaagtgaggaagataatacctccttgtgatgttgttctgcagcagccacagtgagaaatgagtcagaatatacaacagacccatctaggagtttattagggaaaggggatgaaaggaggctgtggtaattaaccaaaaaaggaagtgaaaaggaggaagatgggcatatggagatggtctaaaagggaaactttgctaatgtgcacagagccttatgcagccatggacatagccaagcaaagcatgatgtagtgatctatggttgcagggctcctgagctggttaactatttacctgaaaggaagtggacacatcctgctggctggcagggacaggctgttataaatcagctatataaattgctaattccttttgggctccaggtattcccaggagactgcactgaggtacagaaatattagaggattttttttttcaaaagaaaaaaaaaaagagtaccagggttgagatacaacagggtgtaaactgaatagaagctataggtatgagttcaaatgacacttccatctatgtccaggtaagctactttggacaaattcttcaaagttgtgagttgcctttgaaatttacaattaagatgtaaaatatatcttaccggattactaaattgcatgattttatattatattaaactagggccaacacaatataacagtgagtaaacacaataaagacacatgtggccaagcctaacagcttgcctttggtctttccatcccttgtggttgaaggaacaaaagtgacccccataaattgttccatatatctacatgtcaatagtggtaagtatgtgtgcattagtgaacacacacacacacacacacacacacacacacacacacacacaattgtcaaaacatggtgaactatgccttggggaattgtgagagaggctccaggataaaggcagagggtcttccacctcaagtgcatgtccctggattgtttagacttgattcatgacacctatgacaaaaatttgcattcaatttataagacatattgattcctgttggatgtcaggaaaagctgacagaaaaccccaatctggtcagtgaaccatgaacctgggtatggccttctgccttgcttttgtgctttccctggtataatctatatcatgtgccaggcaactgtgtttaaatgggtctgtcctgacaaagttctgggaaagagctgctctgttaatatttagtatatgcttactggcatttacttacatatttttctgatcatgtttttctgaacccaaacaactgtccttggatcattgctttcctttttactgtcatgcataaaagtacattgaaattgaggtaagattgtccattgcattactctgtagtctaccccattcttttgggtcctcagttcccatgtccagaagacaagatccgcattggtcaacaatagtcaacacagaacaagcaaatctgtaataaactaaatttaaaagatgaacctagacatggagtactgctgggcatgcacaaggccctggataggtggccctcttggggcttggcaaattagacaggtagttatttccttttattgcactttgcattcttaacgtttcctacttctcattgggctaatcataatcctttcatttttccaaatattgaggtaagacagtttttaaaaatagaagcttaatttaataccaaataaagaatctaattatgtcctgaatcaaatcccaccaaataagaggactcatttatttcagaataattccattaatatggctgactaaacagaattctattgttgtatattctcaggaagattcatcaaatgtgattctattttatacataaaatagcaatataatatttgtcaaatactaattaccctaaaattattattaaagacagcaagctaagaagttgttaggagcagggatagacttcttcctgtttttttctgactctgaaaattataatgtttgttgattttgagaaaagctgtcaatgggaggaggaacaggcaatgtcctcacagatacctgaaaatgtaggtatatatgtatgacattgacaaagctgaaattaaagaaagtattctctatgttacttttctttcctctaaataagagatcaccactgacattggttcctagttaatgactgttcacacagtagatgctcaggaaccattcgctctcatgatcaacttgatacgtgccatcacatgacattttgggttttagaaatttatttgattgaaattttttctaatgaaaaccccccagcaagccacattccagtttctctggttgaatcatttcatctattgtgcataaaatatgtccttattgaaaatttaaaaaatatttgtttatactattttaaattaaagaaaatgtatcatttctctattttcttttactcctttgaacttctccaatgtctccttcctcctccataactatataaataaaaaataaatatataaatacaacctgctgagtaccttagtgtgtatgtttttaggattgaccagttggtattggataacaaattagaggacccatccttggggaaaactgattcttcttcttagcagtcactaattgctaatagcatgtcagctggtattactgttaggtcttgtttaggtagccatattattcagatttcctgggtgaagctctcctatctcatttctgagagatactatatcctaggagacttcttggacttctgatatttctagtgaagaacctactactgctactttcctaaactagtattattcctaactgttctctacatatttatccttataatggcaggtaaatcttaccctcataaaagaaactgcttctagcagcaaatagagaccattgcagtgaggcaccagacccttacccagccccctgctttagcagccatgataggctgcagaaaaaacatgtaggcctctgactcagcacatgtctgtacttgctggacctgccccagtcactaggaggccagatactctccccttgtcaaggaaccaatcacaagttagctggtgggctctggacatgcttttggtgctttatggttacagtgtcataacagtggcatgcacagtatagcaaccaccctgggagggcctctaggccatagcaaccagttgaccaatcaacacaagccaggttgtccaagtccaggagtgcaccagtcctgagactgtttcggacccctagacactccccttgctgtccccaataaatacgctgcctcacagccccttcaggtccttctcatgccaaacactgtgttggatggaagagggaaccaagataacacaattaactcattaaacaataaaagactatttgcttttgcatcagaatgggtctctcagtgatttgggagttcagaatttgggcacaaaagcagaaagtcacaactaatcaatatacagagaactgatgaggtgcctagccccaaatgattataacacacacacacacacacacacacacacacacacacacacaatatatatatatagtctcacaaaccctcgaacatctactaagtctcaaggaacattcttgccaaaattacaggtcggggacaatgaggtaaattccattgtccaaccagtgagatatagaaggttccttgctgccaagcctgacaacccatgtttgataccaggaagccacatggtaggagagaatcaattccccaaagctgtcttctgaccttcacatatactccatggcaaaaataaatgtgtaatatacaaatgcaaaataaatctacttaataaaaataaataaaggcctgtgacaggagtcagtatctgaacagtgacacaagactcatggagaaacatatatcacataaaacaggactattaaacctagaaacccagatctgactaaaggtatgaaatcactttatgaaactactttttgtaattttgataatgtttcttgaaagcatgggtgccaaaatgctttatattttctggctaccctgtaacttgcctttgaatttagctctgtttttgcaagattagttagtgaggtcttagttactatggcttaatcatcagatgtcagttgatacccacattgtcctttacctatttgttttgtattactttctgttcttgtgtgaaactggtctcaaggggagttcttggagcatgtaataattccattttgcttctggaaatgacttattttgacaggtatgcattccatgcttggtacctaccaatggtctgttctaaaacttgagagtattctgttgaaagaaaacacaagtactggccaaatgaagcatttgtcctatgggtaggaattatgaggcaaacaaacaggtgtgtgttctggtaagtggtaagagggaagcaacaccaacaacaaaaccatgctaacatggaaagggctgggtgaactaaacattgctcacattccagaaccagattcctcaccaccttcagtgactcagtgccaacagccccagcatcactaatgactaatgacacatttcccccataaccatattttacctatgagcatgctccacacctcctatacagccagccatcctagcctgccctattgctgtctccatccctgttcagaggcagccattttgggggcaccacccagtaaatatgttctgtggtatgatttttgttgtattccttggccacctattgccaagatactcttttgccataaaaccctttcactggggattgtattagttgacaactgagaaaaggttatgtaagtagtcaagaaaacaaaccctcaggtatatcacatggtgacatttgtttacaggtaggacaagagagtaagtagactagagacttccctttactcttcagcagtacaagctgttactcccttgtagtcaatcttcaaattagtaatgacagtgggattaatattttctcattgtcaggtgtaaaggaaactctacttccccaaattctgtccccttccatttccctctaccaaaggagttatttacttacttgtcagaatggacaaatggctacatgtgttgcctattagcatataaaggctcatgctggccccaggcttccacagatcaggaatacccttacagagacttcatgctggcaccctgactcttctcactccttcactcccctagacttcaccaactcatgtgcttccttcccttcctccagcttgtgcaggcaaaaaagaacagtaaaaaaaaatctcagttatactgatactctcaattttcatcgatacttggccatgcatgagacaaccaagttatagaatgactccctctctagaaaccactggatgcagagagcacttatttcctgactgttttcatgaatgtagacactagattttctcaggcatcaggcactctggcagcacaacatgctcctctttggattccttgggtatattactcttcctggccattcacacagctctcatgtacaaacctgacatgctgaagaacccagacttaatcttttctttgaatgccaagatataatgtctcaatttgtgcagaatactggctcatgcctttccctgttaatgacatttgtcctgccattgtcatatcctttagatttcaacttcccaggcaggagcaaagcctatgtaacaagaaagtaaaaagaaatgttatataaccatttgttacatttgaatctggcagtagcccaggtagatatcctaaccattttcaaactcagcactcaactgaattggagatcagaggatcctaggccaatgcctcttctgcttatccggagaacaaaaacgatgattggcatctcggcattttaaattcaaatgataacctcagtcacatattgaactccatatttttcagacatgattcatgcagagctttagtggaggagcatcaatattggtttcagtctagggagtcaggcgtgagagccatgtcactaaccagaggccttaaccagaatgatcatgtttgtatgcttacttgtttatatgaaagttattttataaaatgctgatgcttatgtattttacatgttagctatttaaaacactatcagtgaaatgcagtagtaaacattttaatatgaagtaaaacatgtacgtatagaaaacatggatagctcaacttctattgaaactaggttgttcttgtattggaccagaatgatttcaccagccctgtctctaagccttgtcaaggctggtagaatctataggtcaaaaacccttcctgactcagcaatgaggaagcaatgtggtagaaagagacaagaacacaaaggtaataattagaagtatttttgtcctgtaacaggcaccagagttacactttccaaagactagtttatgtagatttttgttggagcagaaactgccagagttgcaccatcactattagagacctcagctgcaagaccagaactgtcacagtacagtctaggggctgagagactaattgtaagtgatccatcgtagctgtaagatcagagttgaaacagtaaaatctagggtctaaatgatgagtgctaagtgatcacctagaataaataaatatatcttggtgaccagtactgtaggatagagatatcaagaattcagaagctgggtgacagaggaaaccacaggatattcacaattactatgagatagatttatcactatgtgtgccatcactagaaagttcatgagatcatggactcaccgttttgtgatctctctgctgtctttggacatgcttcctaggtcttactttatacattcagattgtggaaataaactaatgagtaaaggatttgaaaatgcaaaaaatatgaaaagtagagacattataaacatcccttcctattatatactatttgggttagactctttataagcagaaaagaattttagttatttacatttattattgttattgtcattattatcattattattatcattgtcattattgttattattgagacagggtttctgtatgtaacaacaattagaggctgtcctggaactcactctgtagaccaggctggcctctaattcacagagatctgcctgcctctgcctctcaagtgctgggattataattgtgtgccatgaccagctggctagttatttatatttattttcctgttgtctactttcccatgagtgtcagttgttcatatgtaaacccttggagattattacacttatttttgaaacatatatggcatttccttgttcaagaaggttagagaacaagatcacacagtaacatactgctggagccaaggttttttagtgtagcattccacttccaggcttttatttaagcactctcctttaatggcattatggttcttctcctttctgtccattacaaacacacctgttgtgtgtactcttgtatatgccttgtacatatcatttgtctctggaaaatatccaggaatgggatggctgatttacagtgcagcctacacttagctttaaagaaaacataaggtgttacttttctgaactcaatatgccattatgtactccaaccagtaacaaataagaaaaatctagcatcttgtcactgtttaatattggcagatactttctttcctaaatggaaagtatttgatggtgataggtgtatgtaggcctgaatgcctacacaactgtgttcacacatggctgtatatgagtgtttgtccatgtgtgcttttgttttcttgtataaaactattattgaagcataaaaaatcaaatgctggggaaggaagagcacactggtcatacacaatatattgcatctagatggttttaagtattaaaagcaaatatgcatatttattgcaagaagtatgctggttatagaaatacagaggataaatccaaagaacataaattagcaatgtagtttgaaagcaagctattgctgcacagtattttctgcaagtttcaatcatcatcactctaagtattcaggtgcatagggaattctgatcctgcccaaatccatataaatgaaatgcaatgattttaccatattcactttctacaattggagaggccaaggctatgaagttactggattattctagaatgccagcttccaggacacagatacgccatggctttaacatgtacccatgtaactttctatccacctgtcattttacctaccttaaacaacaaataaatatcttctgtgatgattactattgattgaaaaaacttgtcatgatctagaatgacctaaggaataagttatgagtgttgttttgaataattgtctagattagattaatttaagtaggactgtcctcataactatggacagcaccgtctcatggactgagctcccagactgaatgaaacgtagagagtgaactgaactgaccactatccttcaactttgcaccctgactgagggaggaatggaatcaacatctcacactcctgctgctgtgacgtctccactggcatgggccgatccttgaactcaaagtcaaataaaccatctcttttacattacaacagcaagagaggtaacaaatccatcctgcttttaattaaagcaatcctaaattttcatactgatttttaaggctctttaaaatcgtgtttcaggaggaaagtagctttcatttccttacatctccagatggcctcaaccagacctgctgccattccaagtgttcaattcccccaaatgatccattacaccctggggcatctaaaataaataaaggttaagagatcagagaagcgggaccatatgtccaaacatattccctgtaacttggcaatagtaatgtaagggtagagtcagattatactgtgcttgcaaagaaaaattcttaaacaaaggtaagcaggggaaagatggtgtcctctggaccaggaatgcaaacagcagttcccttaagggtggtgatgagaagaatgaccactctgctacctctctgtcacagcttttccctgtccaatagaaaattaaatcacagcatgactgggggttttgtcttcaaaggtttgggtttctcactgttgttcatactcagggttctattcctggatggccttcttgtcacagatacattgtttatatgaagttgcaccatagttgcacataacctttgtactatctcccttaaactctaaattgctataaggttactctccatgcctgacttaatctaacatccatggaaaatttccccatactatattgcttagttcttagatgagaaaaatagacaaaattatttttctatcttttattttacattttgttttgctatgtgttaaatataaattctaaagcatgccaggcaaatccttccccataattttgatacgtggttatttgattccacagatatgaaacttaccattacaaagtgataatcacttgtaaactcttattaggaaagcctcctttgttcactggtgttccaagcctccgttcaggagtttggagtcccagttccacattagacatctctgtttctatgtcttcgaatgatcatgtagtttcttcattttgtgcattagttagatcaatccactaaattataaactttttatagcaaaaaatattttctttcaccttttgttaatttgtttcactcacctgttgagactgtgtctatttgtggagtgcagcttgaatgaaggaaaacatagaacccactctggggctcattggtccctactgcagagaaaatatttgtatcaatgcactccacgaaggagtcttatagggctaaaattgataatgatatgaaacatatatcttcacttattggggttttcaagaaagaaggggagtgataaaagtcacatgaaaaccagaggactgtatccatgctctaggccttggagtttgatgttgtgtgttttcaggagacagtgtcagtttattttaggaatataatccaagtgcagagaatatcttgaactacttaaattcaaattttaacattctaatcaattatttttatgaatgaatcccatgacatttaaaatataaaaaagttttcttttttaaatatgtctaaaattgttccaagactggggcagattaatttgtgctttgaaaagccaacaccaccaccaccaccaccaactctagaaatgactatacttgtgtgtgtatgtgtgtgtatatgtgtggtgtgtgtgtgtgtgtgtgtgtgtgtgtgtgtgttaaatgtacttactcataggggtgtgtgcacctgtgcatgcatgtgcacagtgtgtgtgtatgtgtgtttgtacaagcctgcacatgtgcacatgcatacatgtgtttgaggtacatgtggaagccagagactgacatctctgacttgctgtcttgtcagttgtcctccaaatgttttgggggacagtaatgtactgaatctggatgtcattgatttggccatgctaatgggcccctgaactccagggtttcacttgtctttgcctcacaagagctgaggtacagactccgccactgcacccagctgggtgtctgaactagggtccccttgcttgctaagcaagaactccattgactgagccatcaaagctgttgaccacactgttgaagaacaattgcaacttccattccacagagtgtcaacagcatttgcatgatttgggggaacactgacgatgaagtagcagagtcagagctccactaatagaaaacttctactcacctcctcatcaagcacagtgaaggacctataatggaattgtcatgtatctgcaaattaataaacaaacactctacacactgatcttaacatgatttcttaacatgattccttaatcttttacttttctcttcaattagaaaataaaatggattgatcttagatagagccatggaaaataagaatgttatactcaataccctaacaccgactatgattatatacttcctgaataagaaaacacagttgccttaacagctatcatttttgtatgatcatactttttttctcagtatgtacaattgctattttattatgttcattacattaatttccagtgaggattactcatttcttcatttggaaatatgtcataggctctaagccttatatcactcatatatctcctaaaggggatgagtattgcagttagagaaaaataagcggtgagaatactcctagatttgggcatttgacctggctgtttttatagttttagtgattcagctcagtgaataaaaaggtttgtgactaaatttgaaatgctaagatactggggctcatggataaaaagttgaaagtgcaaatcctcaggaagattatgtgaattgtttgcctcatgcattggtctaaaaaataaatgagacactgcatatggcataacagtatgaggagtttagtaatccctcgagaaacttcagctagtgaaagtgaagactaagtaaacagtaattgcactgagctaaccaatacccagagtttggtcctggttcataaaatatcagtcatttgacttaaccaacaaacattggttttctgcattctgaaaactgagaggtacaagtcaaaggtctgagcagattctgtaccatacttcccatcctggttgtggatggatgccttcttgcaatatccttgcgcaatcagagagcctgtgtgtctttctgtttacatcaacattggtatgagtgctaactgggagagccactatgaagataccaatcagcatggaagttcctgagaaagcaagcattagctctgtcacaggatccagcttgaccttcattgcaatatgcataaaggacttgataatattacagttatacgtgctcacccatattcttcacctctgtagtcacaatagccaggatatgcagacaacctagatgtccacttataagatggtaacttttacaatgatgtattattcagttgttaagaaaaatgaaattcacaggcagatggataaagtcggaaacaatcattcagagtgcagtaactaatgtccagaaagatgaacaatccatgttgtctctcgtatgaatgttccttttcttcttaaataatagagttactatcatcacaaggactacacctaaggatcaaagccacccctattgacctcctgagatctgtatcctcaaatatcaccagattagaaaacaaggctttacccatatgtatctgtggtaaaaacacattcaaccgttgcatctggctttatccaaaatgtaaacatgccatcatttcttataagaccaacaggaagaaaccattgaaaggaaaattgcagtgggtccattgggtaagggttaatgttgtagactttctaataaaatctattgtaaatttggtaaataaaaacacatacattattgagttatgtgtttcacaacatgtgatgacttgggactttttagtgaaattcaaagtgtcaggcaagcagagctctctcatggcatttggtagttcctttttgctttagcaatgttagtattctagggcacaaatctgctctgtaaaatgtgttgcctcttgtttgaaacagggggcagatgactccactagaagacagatctagttaatgctcacacagctccacggtgtggcttatctgaagtgaatgtcaaaccatatgagatatgagcagcctgaattagaaatacaacatcaatggaacagaaatctgcttagaaacaaataattagaaagcatatgtgaagatccaaaagccgtgatttggagatgactaatgttttcctctaaccgttccagcactgacaataattttctgtttgcagaaacacccgctgaagagtccatttttagacagcttctagctccagtcattcccaaactatcaaagacacctcagtttgtaacttcaaaaaccatggatctagagaacttaactcttatctacctggatatgagatctacaagatccgataacaatccatatacactatactggtcataaatacaaaataacccaaacaaataatattctagcgtcatttatcaattgcaccaagttcaccattaccttcccaaagagcagtgccagcatacccttcagaggcagtcatcttcacaacccgtgccctgctaggtgtattctctgccaacagctaattatccctgtttcctaagggagagagtagccagacctgtgccaggacttaaccttctgtagtccatctgtatgtacaaagagctttattgacttcaagaattctatatgatttggtaactggcaatcaaaagctgttttcatcaaaatgcttcaagtgctcattgagcctacaaggtaaccaagattagagtgaaacgcttgtatgtaggccctagtttgagtctgcttatcttactttcaattgcatgtcagttgactctgcatgcagaagttaatcaccaagaatgtctatctacctatcctaccattgcactaatcccaaactgcctgaaattccaggaactgcaaaaccttgctggtagatatgaccaatgccacatgagaaaaatcattggtcctggagatgactcacttggggcatgccgaagatcatctttcaggaacaggaccagtggtccccctgaagcaaagcgaactagcagatttgtacctgaccactgtgcagtattctcatgtttatttcttttatttttatttgacaacttactatgtagcccaggctggcctttaacgcagtgatcctcctcctgcttcagagacccagagtgctgggattaaaggcataagtaaccacatatgactttggggctgcttaattatgcaaatttcttgtgaataaccccagatatttctctgtttaaacctacaacttacatcagtactggaaagcggagcctggctgcctctggactccctgtaccctcttttcagtgtacactgaggattgatttaggcaggagtctttggaacggaggctgagcctaactcattatggcaacagaagcacagactttttaccttactctggatacaagttgaatttcaaatttgaagtaaacatcaagccgaaaagacagaattttaagagaaataatgatgtgtgatgtagtgcatacaatttggtaaatttatctaatgatgattttaagtgaccaatactttaccaatttcttcctcaatgactttagattttattaaaattacagattttatttttctaaataactaacattgtgaaagcataatcaaaatcttattcctaatctggcagttttgagtggaacacacatgtttgtatgtgggtttctcagataagctgttccatataaagtattagatccaattgtgatgattaagacacaaaatcacactgcaaacaacactctatagcttctagttactgtactggactccatgtgtttgggactgtaatggaagagttgatgctctaaggcctatggtggtccatctgctaagtgcctgtgcagacattggattcccacattatttcataaacaataaaggctatactatgttcatgacatgtattgggtatcagaagttattcagagatgttttatgggagggccagtgatacagcatggcaggtaaagggactttctaacaagcctaacatgtaccatttctttggatccatatggtggaaggtgacaacagactgtcacaacttgtcctttgaccaccacatccacaataagatggtgtgtttgcacatgtgtgtgcatgtccacacacacacacacacattaaataaataaaatgtaataaaaatgaaacttgtgaaagactctttataggccatttatagaccatatggcatttatcataagggacagcgttagtggtctggacagatctcagttaaaggagcttgaacagcagcaggctatgcacattcaagtatgttcttagaaatgcccatttttgctaaaggcagtgaggggtaccatggctgcccttccctcacctgccacagtgattcagcaagcccatctgattccccaggtgtgaatgcaacaaacccagagctgtgatcatttccagaaggagactgtgtgggagagttgacaagtgcttagtctcccactagctgatgcaggaaaataaccctaacaaccagtcttggttgtccagatggcataaggaggcccagccctcccaggcacaaaactgagtgggtgtgtatgggagtgaaaaagaaaaacaaatgcatgataaagcatagacactcttgaaaattcattcattaagtttgatacaatgccttgaaaattattttaatttctttcctgtgggatcattaaatgagcagaattttctgtttcagtacctaagtggaaatctcatgagctgcatttaatatagagaggtaaaacttaaggtggcattcatatggatggtctattatcaagtaaaacagtctaatacaattatatctatcctgtgattacagcaatatcagactacttcttatctttaaactagaagtgacttaaaaaacaatgtgctatgaatgtctgttaactctgtttctcataattttctctaataattaatatacctatcaatatatgtaatccatatctaatgaatgcttcattttaaaagtgttgatttaaatacatgaagttttatatttagttattattaactgttaaaatttgtgtctcaaaggggttgaataaagtattggaatggaaaatatttcttaaagtcattctgagaagtaaataacttagaagtatataggagcacatgcacttacatcaggtttgaacagagtcaagaatgaaactctactgaaggcatgttattcttcaacagtttaaaaaggagaaaggcccagtcttcatgagtctacagacgtaagatcaattcttggggatatcccattttgtttgtgcaacttagtacatagttcttctctttactgcatagtaattcttcatggagctgggtagtaacactctccttatgacattgtggaaatagttattgaaaaaaatgtgtagtctgccacaggtaaagaggacatcaattctgaatacacttgtgttacctgtgaggtgtttatggaagaggttaagtgtgagaaaaggatggaggaataaacatatacattaaaatcagaaggttccagaaggcaatacttaatttgaaatgccaaatatgcatatttataatgctttcattcagtttgtgattttgcttcacgaaagtcttagattttgcaccaagaatctatcactcaatacactgaaaacactaggtgttagtttaaatgtggacctgagtaaaatactgagcttatcagagtcttcactctctaccacattttctgctatatcacatgacttttgttctgtcttaaattttttaaattacatatattgtgggcagattggggcatgcatgtgaagaccagagaacaacttgtgtatgcatgtttttttcaaagtcatttacccttccttctctgtgcatatcattgaagattactggcagtgtggcaatggtaagaaacattaggcaatcctctctgctgggaattttgtttctaaggaaatctacaaaacatgtaacagttaattttttaggagagtttggagtgggtcttcttggcatcatttatcaagagatgaaattacttcagggccaattatttctccaatgatttttataactaagtattaaaagggcatttaccccaaagatacatttggtaaatgatgttgtgagaatacttcctaaattttggtgacagcaaggtatagtatatagttaaaattgggcaactccttttaacgtgcttgtgtagaacatgcagaaggaatttactgcctttctgcagcttcccagcaaaaggcttactagtgaccctcagcactcagaccctcagacatggaggccctggttagtggtaacaatgagcaaatgattattgatgaaggatttcacaaattaaattactagagatatttattatgtgagattttataggtggattttaatcttacagtttttgtcagttttaattgttatatattttgaaagttatttcatgaatgaggcaacacatagcttagggtattttaatcatacactacttattccagtgtacatacagcatgctattggattatagcttttgatatatctatttgagattgacattatcttacatcaaaatgagatgattacatgaaacaccttcttaagtgttcttcttttgagtgtttttgatcagtaccatagcccatttttgtaactgggttgtttgttttcttgatttttagattttctgaatactgtgtatgttatagatattaaacctctgtcaggtgaatagttggcaaagatgtgctcacatcttcagcttcatcttcaagctgtggtctgttgttttaaagagcttttaagagtcataaaattgattccattagtctgttgtttttattatgtgagctacccaagtcctgcctacaaagtcaggcctataactggattcttttgattgttacaacagaaggcttctaaaacatagccatggggaaagtttcccatttatgcagcttctaatcataggatatatttgtgtatgcatgtatagattgatggatatagatttgaaaagcagatttatcttattctctctctctttctctctgtcactctatgtccctctctctctctctcttacacgctcgtgtgtgtgtgtgtgtgtgtgtgtgtgtgtgtgtgtgtgtatctgtatttgtgtatggcttgtgtgtattggtgtacacacaccaagagtctagaagaagttggatgccctcaagccagtgttgtaggtgattgtgttgtaataatttagcagaggaaagtatcttggcaagttggagccaaggggtgccacaaagtcatagcaagcaacagatatgtgagagggttataggggtgtgggcagaggtggcctatgagcaagagaggaagtcactcacgctttataagtggatatagcacatagggagagtgcacaactggtggatacagagtcacatcttggctggtgataatgatttgttccactgtcacttggtccctgagggaagtcagatgggaatgcctgaatgttaacatgtatgccacggtggtatatgggtattgggaactcaccttggttcctcagaagtaaaaaaaaaagtgttcttaaccaccgaggcatctcaatatcatcaagattttgagtgtaacagaaatagaagcaaggcaaaagaagattgttttagattatctcaattttcaagactttaatactcaagcttaaatgagaatattttagttggtttgaattgtcaaaaacaaagatcttcagtgtgaaaacagccttggttatcctatcgcaacgttttccccagtacaagatagttttaacagtgaagccatcagtaaatgtaagtcatgggacagggattgtttgataatgcacagctgacctttttttgatagccagccctgggagggagactgttctgtggagtgacacagacctgtgctgaagtcccctttcagtgacagtgttttcaaactgccaagaacaggcatattgtctctgtcttaagtctccttgtccccagagtgcatcatttcccaggcgataaagattcattatggcctgctctccttacccagctctgcaggtggctaatgctgctcttccagatggagcttgacaagcacagacatctcactggggcacctggcagcctccactctggcagccaggtttaccaagatcgaaatacagcaactaataatcctttctcatttttcaaactttgtattttgagctggttttaccttgttttacgtatttccttttcattagttttacccacagggggaaaaaatggctcttttcttggagctacttagcaggaattctactagtatcacagcaggaagcttaaattttccaatttaattcaaacagatagttattatgctcctcaaaataaaaataacaataattgaatttggacagtaaaattggtttctttaaaatatttagttctgagtgctttttgtagataaggggatgacttaacatattttcatgaagtataatttctaaaatcattctcctaatttgcttttggttacaggtaaaagctttgtgtttaacaacttatcatttataaccctgatttgtgtctcccacccaccaccccttcacttgcagctgtctctgaatataattataaaaaattagtttagggaaaactaccagacaaactacattccccaggtaatgatttccataatatttcaaattctggaaatttttttttattttttgcaagtaacatattcttctctcacgtttaagactgtctttgcaatttattttctgattctaataaatattttaaaatatgagacatcagcatggcaaacaaagcaatcgccgctgtttatgtcaagatactttagctgcttactttataaagaagagcaacatgttcttccatcatactcaatcacactctgtgtttgccactgtaatttctgtcttaatttggacaactgcaatgatttccagttggatagcgattacataggattcttttattcacccagttgtctgtctgtctatctatctatctatctatctgtctatctatctatctatctatctatctatctatctatctatcatatatctatctagagatgaggtttcaaatagttgaacttgtccttaagctcctcatgatttttctatctccatatcctgagtgttagcacatgctaccaggcatgtctgtaatcatggtttctcatttaaatatttcaactccaagtaaacactgaactgaaatcatttttcataattgttttactcactcaggatttaactccctagtaatttgatggagattcttacttgaccttcaaaacaaccctgtttttctgaagctcaattgaaggctttgcttctcgtttttcttatcagttgtttcccgctcaaatgctttacctttacaaaacctacagggtgtgaggtttgtagatctctggataccctactgtactccacagtgagacaccaacctatatattctgatttgttctcctactgtttgttgaacccaagaaactgaaagttttatacaagtcattcagcttgaaccagcagaagtgagactcatatgcatattttctgacatcaaatgttccatcagtttccatttacaggtggggtgtaaattctgatgagaaaaataataaagatagatacgaaagtataggtcagaaataacgccaagcaaggttaataatgttcactattttgtattcacatatgttttatcaagcacagattttaaatcttttattaagtggcaatatattttatgttgtgacacatattcatgtctgttttaaatcaacatgctaatatttattagtccatttaaagtgaaatgttagctgttacttcaatttgttttgggtacattggaatataagttcttttatgaagaaatctctttccccattataaaacatgattaaaattttattttatctacttctggactttaatttagaaaaggcacaactcatatatgctaagaccccaagtgttttaatacccacccccagtaaagtagatttgatggattattattttacaggaaagccaacccgcaaatgacttgcaataaaagcagaagcaagtagaccatcttctgtaaaatatagaatgttcagctcaaagacattttgatacatttgtattctgtaatcttaaatacatttaggataaacataggagatttatacttattttaatttattactttttaaagatttatttattaattttgcgtacagtgttctgcttgcatgtatgcctacaggatagaagagagcactagatctcattacagatgattttgagcctctatgtggtttctgggaattgaactcaggacctttggacaaatagctcatactcttaacctctgacactatgactgaggttattagaatgagtatttattatttcaggtagaagtctctgtactttttcctctttactcctcacatttgctcttaaaagctttctttccattcttctcatcccacctgaaaatatagccatcataccaagatacaaagaatgtcaattcaaagttttcatctcatcagacccagtacagctcttgtgttgtgaaatattaatttaagatgtgttgcattcagttatgctgtgggaaaatttgtttaatgatgcaatgtgttccattcttttatgttgcaattctttaactttttaaagctgttactttgcctacctaaaacacttgattggtctaataaagagctgaatggccaatagttatgaaggagaggggcaggcggggctggcaggcagaaagaataaataggaggagaaatctagggaagagagtgaggaatgagtaaaggagaggtcgatgccaagaaatagctacctagccacacagctagccatggagtaagaagggcagaaagatatacagaataaagaaagttaaaaatcccagaggcaaatatagttaaagagaaatgggaaagctggctagaaataagtcaagctacggctaaggattcatatgtaacaataagtctccatgcatttatttgagatctgagtggcagacccccaaagagttacaaaatgaattacactccactcctccttttctaataagagttaaacatcccctttacaaaacttcttcactattctttcaggctctcttgctgcagtctttctttggcctctcccctctgtaatcattcttcattattcttctttcagattctgtcactgctctttctttggaccctccctctaatacattgcctttcctttgtaacctgaaagatgcatggaatcttcagtgttctgtcttcattcaaactgtcttcctggcatttaggttttatcagcaaatacttccaaattttatctctagacaactcagttttcttacttcagttcatatttcctatggctcaatatgccccatgggattgcatgactccaaaacattatagttctgtcatcttcaccatgtgacagccttatctgaaagtgagctccttgaatcccatcacacatctgctcctttgttatcctcccaatctcagtaggaaggaattacctttttagttgccaaggcaacccctgcattactctttcttgggcttaaatcctttcattttattataagtcttatataatccatcaacaaacactaaaacttcaattaaagagtgacactcatccaaaaaatttccaatcattttcattattttttctacatctatggctcatgttctagttcttatgctaatatgaatgaaatatttttgattgaactctccttacgtttgaagaagtggatacaacaatttgagggagttttctgaattcactagtgcacattaacatatcttcgtatacttctaataaaataagataaaatcagtttaaaagtcccagttatatttagatcaagattagtgttaggatgaagactttgcatatatgtatttgattcagaaatttattctaagccctagtgtacattcatagagcaaaatctgactccagttaattatatcttagcagtagatatcattagtgcatccattacaatccctcaaatgctcccttacagccatatagggcagctggtgagttcattgacatcttccaagctcagtggtccataggccattgcactgtcttgatccttctctgcctctgggttatcatgagcattattggaatctgctcaggcctgtgctgcacgttgccaagtgttagttgctctaaagttagtctttatatactgacaactgatggaaacaatcataattcatgaatctgtgactgttgtgatgtatagtcaccaggggcttctcttacttgtcagcaaatgctggatttcagttgttgcaaatagcacagggttttttaaaaattcaatttgttttagaagtggttgctgaaataactctgatgcaactgagtatggtcttcaaaggaaacatttcatgggagggaagagaatatacattattgttttattattctgatattttagttgaagaccagagtcataatgtctacacagaacagacaatacagcatttgcatgcaactgaaatacattttcttaaaacgcaaatgtttctatttctccaaaacttcacaatcaagatgatttgggcaactttaagtaagatagcataaaaaagcatgagtgatttccaaactgaaattaataaatgtggctcagtctcagagtaataccacatatatttgatttcaaaatttgggagattgagacataaaggttaagaattcaaggctgttcttgactattcagtgagtgttaggctagctacaggagaacctgctaacctgggctacatgagaatctaagtcaagaagaaaggataaatacataaattaaagtccacatagagttatggctcactgtgttggcagtactggctcatttgaggaatttattgtctactattctaatccttaaatttagtgtaagtcgattcttttgaaaaaaactaaaatcaattttgtttactgtttttaaagttcataaggatacactgctacctaaatatctttggtcatcttcattcaatacaaatatataagccaaaatattacccctacatataatgttaaatttactattaattgcccattagaaggaaataaaagaaaaagctaattttactgatatagtttatttcattcattttaaatgttctcattttaagatgcaaccaaattagttattaatgaaacagttggtacattttatgctgaagtctgtcaatatttattgtatcttattttcatgacgttatgttgatcgaaggattctgtcccggcaagtatctgcctatatggggcaatacaaattggggtaatattatattgataaggacatgggctaggcccatatattttttcagtaattttctagctattagctattttatgaaatatttctaagttgctttccatgttgagttctttaatatgctcactgtcttctagttgccaacatgaggacattgattcttaattctcaattcaggatagatgggtttctatttgtggaagcctagttatatttttatattctattattaaattgtgaggcattgaggagctagactataacatctgttacagctcatttctgagaatttatgtggttttgggtgagaatcttcaaagttctaagaacaaagagcagcacactttcagtacaaaagcatgcatgtatgtgttagtgttttgtttttgtttattgcaaggacctgattatgtcatccttgacagtaaatattttctgaccaaagggaaaagtttggaatggaaaaatggctcagcagtcaagagcactgcttgctcttccaaaggacccaagttcaatttttcagtacacatatagtggcttacaatctttgtgactcccattccagggcctctgatgttatcttctgtccctacaggtaccaggaacacaaatggtacacagacatccattcaagaaaaatactcttatacgtgaaataaaatttaaaaatgtaaaagggaaagaccacccatacaaacatatgtttatgcatgagaaacagaacaaaaaggaatggtggggaatgagaggagggaaatatatcatttaaaacaattcctacaaaagaggatagagtgaagagaagaatgtgaaaatccattattgttaactgtgttggagaggtctgagaacaagaggggactcagtcacctggaagacccttctctgggaaagttactccactcgtttttgttcccactgcatggatcactgcagtctttgaatgatacaattgggggctgtgacacacagatatagggggactttccacttatttccacatgttagcttagtgttaggtatctttaaaacaacttatttttatttactgtatggatgttctatttcagtatacatatgatacagtatacagcacttgcacacttggtagccccataaatcaaagagggcatcagataacatggaattggagttacatacagttgtgaggcacccctcaagttctggggtcataacttgggtgctttgcaatagcaaaaagtacttttaacccctaagccacttttctagccccaatcttagatatcctaaatagcaaaacaatattaagagttatattcagaatttacctctaaaatgcttgactaattgttttaacttttcagttatttgaaaagcatgattattgtgggaagaattgactctgacagagcacttgtctataaagtgcatcaggttgagtctgtctttccaagggccaccactggaagagaggacactgagcactgctataaaggaccttgtatcctcagattgtttgcttccttcgagtgtcactaatggagattctcaaaaatctctacagcatatgtgaacagaaacatcttctgaaaggactgtgggtctgctcttcccaggcaatacataccagacataccagctaagaagatggatgaaacctgaagcaattaaggtgctcaactagaattaacatagaatcataggactcttgtatggcagtcagtcatgaggacagaacatggtaggctaagaccagtgttatcatgtctcaggtaaaagatgtcaggttttgaggactacttacttaaatcttccaaataagaaaaatcagaaagccataccagcttctaaatcacaacacacaaaaaaagaaagacaaaagaatgataaagactgttgtttaaagggaataatattgttaataaaacaagttttgccttttctttaaaatttttacttttatttataagtgtgtgtgtgtgtgtgtgtgtgtgtgtgtgtgtgtgtgtgtgtgtgttagtttgtgtctgtatgaatgtgtatgtgcttggatacagttgcctgtagaagcccgaaacattgtcagatatcctggagctggagttgcagatgattgtgaccagctgacactgatgctgggacccaagctcaatcactatgcaaatatttcaccctaatttccctctttcagcctcatgttacaacctcttacagtgtgctatggcagaacactgccagtaagaattcatttgcagtgtaattttttattaccaacagtctaatgaggtctccatacacatcatatttaaggctgtgtgatttttgttcctagggatagtatggcattgtttaaagaacacctaatgctatttgtatttgaaacatgggttctgccaatcattgtcactcataaaaaaatgaagagagcctgggagatggatctgtggttaagagaaaaggcagctcatccagaagaacccggcttggattcttagcacccaaacagctgttcaaaactccattcccctagtcagctgatatcttcttctgataaccatggacactgaatgtgttttgtgtaccggcatccacataggcaaagtactcatatgtaaaacaataaaaataagtatggagagatgctctctcaacttggatacactggggagggcctaggccctgtcccagttgaagtgacagactttggtgatccccatgggaggcctcaccctccctggggcatggataggggttggtagggagcatgggaggagggaaggcagagggaattgagattggtatgtaaaatgagattgtttttaatttaaaaaatttattaaaaatgagtaaatttaaaaaataagagtaaaaataaaacaagtattgttaaataacttataaagctattatttatggaataaaataaacatctgcctttgtagcaatgagtatagtcatattaataagaatttatatacttttctctaagtatcaagactaggtgcaaggaatcatgggaggcacagatttgtatagatgtgccacacagttcaaaatgaagcctatgcaaaatgaaagtggaggaacaactattatcagttagtatatgggttagtttttctttttatagaagaagaaacagaaatgcagttgaagcaagacaaattgatagtgatttgaaatgagaaagagagagacagagagacagagacagagagagaatgtactgtgtttatatgctaaaacatgaagaaatgaattagagaaagatggtagaatacatacttagggacaatgaattgaagggaataaatggatatgaatttccttataaataatgtttatatcagttggctaatgctacatgatgaattaatttaaatgtgatgactgaaaacaaaagtggcatcatgacatctgacattttgtatctgtcttcccttcctaatcagcatcatgattgtggggaccaccactcacttccctaaggtctacctcagggctggctcactgcagcttttgtttcattctatctatccatcatgacacaccatataaatcaaacccagtggcaggaagcacattttagtccttaaccaggaacaactgggaagtaccatgtcaaaaggtagcagagtgcaaagaatcagagacaggattaccatctaacaagctgtaaaatacatagcagaaagttctatagtagatgtatttttttaaaaaaattcaccagcatcaaagcttaaattctattttgctggcaagagggagttattaaaagtttagatggcaagatggttcaatatagtcttttgtctcattttttaccatatcctttgtcctgtgcattttatagaacacgtgtggctttcttaaaaatgtatttctctgtattgacatgatgtaaatattgctgtatttttgtcctcaagttaaaattctgcttatcacattgagattttaaagtctaaattaagctatttttcatcatttagcttctgaacagcacacttagaaatttaattttatttagttttatgctcagaatttcacttacacatttatgggatggtaccttcctcctcactcaactactgtattctctcactttgtttttatgtctagtttaataagacagaaattgtaggtagacctgtagccagcccctaagcaggcgtggctacaggttcccctaccagaaatattttctgttgttcctaatgtcttccagaggcctaactaggcctgttgcctattcacttaacacgttttaaaaatttcattcaattatttatttatattttgtgcatatgtgaattgtgtgtacctgagtgtaagcattatacaacatgtactcataaagccctcagcttatgctatagaggccataagagagtgatagttctcttggaactggagtcacagcagctgtgagtgctggagatgcctgacactgaaatcacatcctctgcaagagtagcaagtgctacccacacctgcacctgtgtctgcacctgcccctgcactgcacttgctaggctatgtctctagccccttaacacattccaaagaattgttctatgttaactttacagttgtaggtaaccaaaatcagatgaaggaaattaagacctgtttgaaacagagcactcctttgtgtaatgatatctttctgcttttaggcatttcacttggctttgcatatatgcttgggctaggtgtttatttttagtcatctttctatgttaagatatttcaatcaaaaagaaatttagacagaggtgatttacaggtgctaaaattgctgaagacacaaacatcaggaaagaacacaattaactcttaggtttacctttagagctcaaagtgaagggattctaagtaactccctacacacttctggcactgtacagtatccctgggactgcatcagtgcctgcttcagtaggaggggcttcggcagtgcctccctctcaggtaaggttctgtttgctgtcatctactgctcagggcctgacaggtgttgaaggaattgcactgttggacttccaggctttctgatttccatgggaacacaggaatggggaactggactaactctaggtcccaagccagaacagccctaggcaacaatatttttcagtaatgagtgaaacactgaaattccatcttcatatgatctgggagaaaaacagttgcattctaatacttttctttcttacacccaattaagagtttcacattgcatgactagtttcacattgctagtgccaggaaaggacacatctacttagtttctctctttttttctttcttcctgtttcctttccttccacaacatccctccttctcttcccttctcatcttttcttcccctctattcctattctctcctccatgtttcttttcttctcccccctcttctctttgcttcattaatattttatcaggatctcaagagagtgtagttctctttggtgattaaaaaaacacggtacttattttgtcaaagtacagccatctgttaaacattttctgtataccaaacttcaaatgtaatcacttctgtatatgtcactgtgtatacacagatgtagttatagatatgttctatcctgtctccctacacctcttctaaaagttaggtatgatccaatttataagtgaagaaactctgaggctcataaaaattaatataatagctggagtttcccaagtggcaaaataaaagagacacagtccaattttaacttcttcataaactataatcttttcatttgccatttaaaccccaaaacatatagaaaagacaatagtttttagaaaatagtccactcctattaaacatttatatttttttaaaatctggaacccactctctgtcctaggaaagatagattagcatcagcaccattgtagactgatttgttgatagaaatagatcagcctctaagttttcacatctctggccattcatatttcctccattgctcatatgtacacaggattggatggacactgccattaaaacttactccagaacattcattttgaattttttccgattcaaaggtattctcccgatcattaaaaggtattgagaagttttgtaaaattgaatgtaattatttctgataaaaaaaactttctaagtatgtgcatacacacatgcgcctctagtcagaagacaactatggaagtcagttgtctccctctaacatatgatttctagagagttaacccaggtcatcagactcagctgcaagcaccttactttcctcagccatctagctgggccttatcaatattcttctgtttcaatagtcctttgcacataatttccatatatgtaactagagttcctatatactggttatatgtcatatcttgcatgacaaaattgaatacccttacattaactgtagtgattgtatgtagacaacttacagctgtgtcccatcacgctccaaaagttttttgttccataaagcctaggcactctgtcatggcaaccccatgatgtcatcaccactctgttcttcttctcccttctccttctttaggtaaaccccactttgtttccagacttaagaagtccaattaagaagcattcatttccccaaggtagcctccatgaataggatggcagttaaactaagaccaacttcaatgactacacctttccccctctacaacaaacagagggagataaacactgacagggtttactgaccacctgcatggttcaaaacatttcacatcaacagaatagtaacttggggaagaattctctatgaattgacctagatagacaattttatatttttgtgtaatatatatctaataaaatagatcaaggcacaatttttataaaacaatcttcaaatatagttaaaaaataactatgttttacaaagagcaaaatatgtataactttagcataactcctacaagttaattgcaattttagtggtataaatttgtgcatgggactcccttttccctccttggcaattaggcattgcagttcctatctgttattgatgcatatctgtggaagaatactgtggtttccccaaatcactgatacattctgatattcactctgggcatttccatgtattttcctttgagtttaatatttcaggtatgaattatatactgtgaacatgttcacaagtaacaatggtattcacatataaacagaacatacaattaacaaatacatgtgaatggtttctttcaacaatgttgtacaattttcaaaagtgttactaatgaaatttaaatttctccagttttaaaactcagagcaccttgcactcctattctcagccactgtacctccagctacatgcatgcagtaatgcccagtttttttttttcattatgtaatgagcaatactgccaattctgaaaatctataacctcagagcccctggccccctccataatggaaggaactctgcctcttgggcctgtgccaatgactactggagacagttgtgtaagttattgaggaaagtgttttattctcagtggctgaacttaggaccccttttaatatgtgtcacctcttataatggcttagttggtgtgttagatgaactgtcaatgagtcccctgaatgtttttagtggttgcagagacagatgacatgcaagtccatgaatgactcagactttatttaatgtgacactgtaacccaagctcatcagactcatcaattctaattcacttatgcctctttggaatgttcagtccaattcatctgtttagattgttttcattctactaagatgtgcttttcaataagtcagtaacaagaatgacatgacaagagtgcattgtactctgtcaagtcaggatcctcagattccctgttcagtggctggacctccacatccctattctcaactcagcttaataagacatcaagaaaagcctcttatcagaatttggagttctgcttgaatccattaattgaatacatttgggttgacacctgaggtagtgtacaaggtcacagttggtcaagacacatcttattttcattgttaatatgtctaatgtaaatttaaattctgtcttcacacatgtgtaagtgagcattatatttcctctcaccctacagcagttgtgttgtgttctgatgctcttctttttttcttaaatttacaagcaccataaatcatttatctattcccctgctaagttgaaccaaggtgtcaggatacaatttaatgttcataggcatttcagaagtagaaatataatatggagtttgatttattaaaatgttcatgcttaaacaaaacaaaatgatacatagaaaataacacctttccatgggtttatatatcgctagaatatggatttctgaactttatttaactttactttgtttctataatatattctgaaatcattcttacaactggcccagttatgatgactatctaaaagtctttccaatgtttcaatgaaatgatgtgttaattcacgggaaaattaggttaatacccccatgatttggagagtcctgtcagaaacattctgtcaccttctctgtcctttctccttcaggtttcctatttacttacctattgctttctttttaaatattaaatatcatggttgcttttcttgacagatttaattgatggataccttgtgtagttagggtttttaatcaacagaattgttataatttaacagaattcatgaaagtttggagaatataaactctccagaatttgcacgtggctgtaggactaaggttaaacacctgaatcaattgtcatcttacactgtcctatagaacagctcacaagcttggtcaactcctcacttctattctgcctttgaagattctgaacttgtagaatatacttggaaaagaacctctcacattttaaatcagtttaataattagagaatggaaacctttaattagtttgatatgatacatattttataaacaataattcattttcaattaacatttaaaacttctgagttatcagtattagatatgtgtttattcatgtattataaatagtgtaggagtcccacttttaaggaccattactaagtcacacaatgaatattttcacaatagacaagtgtaattaatatctggtgatatgtgttgttgggtgccatgcaaacaaggcagcactcatgaacaaaaagcacttgacatccttgtgtaggaaatgcctggctcattctagttggcaaggctacctctcccttcaggtgacctcctgctcacttaacataatcattatcttcaatctgaaacaagctaacaggtacaacatccacttgccagaaagccagacactagtgagcacattgcatgacttgagacttcagaatgttcccctgctatcagcagctatctggggctacccattttacctgccatgcttatgcaaaccaaaaaccaaagtaaaatcattgtgtgccactttgactacaatatttctgtaatatcttcgtgcttactttttttcaaactaagtatttttacttcaaacacaaagtgccacttgatttgagcacatattaatcttgagcttacaggggtagtcccttgaaagtgtagctgctgagacaacacacatggctttccttctaagggtttccaggcaacatttttttcatttgcaacaaaatgtattaaagagaaaataacagccgtacctgttttttgaatcagggtccaaatcacactctccaaaaaggcagtggttgatgcaaagtaatccttttgtggtagtcatgcagaaatgatgcttagtggaacttgaatggcattaaactgcaatcttctaaaaatacctgttaagaaagtgttgcaaatgtgaataaaaaagactcctctaaaatgttttcatttatcccaagcccattattaaatattataagccatggctctatttaatgataacttgaaatctcaatatttactcctatacacaattgatgatgctggtttttatttgaagtattcattgaattgaaatttcttacatgattacaatagttaaagaaccattcaccacatcacttcatatctgtgttttaataattctccagtttttaagagatactttatatttaatgctattctaagtatttgtgaaattttattttgtattttatttaaggaattgaaaatctaagaagtagttgtctttttaaactatttgaaccactatgtcattggttctctggtgtgctgaaaggaatttacatgtttgaggatgtctctattttgtgtaatttaagtgacattcattgtttagtgaaattctctaaaaatgaaatggtttgggtttatataacatgttttcatagatccattgaagtgtttcaagatctggaatcaacagccatggggaattgatgtactagtttgaactcaaatattagcagcccagagacacagggttaacattactgatttaagttaatgagaaaacatgctccagtttgaaggctgtcatccaggaggaatccacacctcattcagaggagtgtcaacctttgtgttgtcccaagacatctgctttcaactgatcagctatggcccaccttggggtggtatcttacttgtacaaataaagcttgtctgaatatcagagattgtagcttgcctctagctaaccatagaggtctggaggtctatacaggcagacaggaagtgagatggctgggaagagagagaggatataacctggaagaaacaggaactcactccctattgctgagaccctaggagataaggtggcttgctcctccttctctctgatctctcagcattttcctctatatctgactctgggattttattatttagatcaattaacaactcctatttacaccacctatattaaagaggactgctttgttcattcaactgattaacatattaacatatctacaaacacttgcaatgtcacattcagaactatcaaaaatctaagaccctccaagtagacacacgttaaccaacatgtattcttactgttgtgcactccttagactcgccacaaaatgatttacataaaatgtaaccatgttccattgtaggtaattttcatggctcatttcacttttacatgtagaattcattcatttctccttgatacattgcatactacttgacctatttgtccttcactcccacccatatggtagtacattcttaagtgctgccttcttgaattcttacttcccttttttcctagatggttcagaccctccacataacatgaaaggttgcatattgatgcacctttccttgggagttatctaagtgatacgaaattgcctaagtgcaatacatgcctaagtgcagccaggaggcaggtggtcttcctctcctgacccttctggaagacaatagtcatagtcatcagctcctcttcctgttccatttctttcctgtgtgtatgagcctgccatcttcccacaactgtgagccataggtcttatagccctctcagacttcttattcttcctctgtttaattattttccaaatcatgctgacttaaccgctgtcaatctcagatctattcctactccattcctatcactactgtggtttaggtgggcattttcatgattgccattaaatcagtcacactgcatccagaatgacagtgcagaaagcaaatcagaaaacaggagaaagggttctgatacttccttgtataaacttttattcatatactcgtgaagcaaattcattttaatatatttcttgattctccattgtatcatatgccctatactatatatagaaaacttaaaattaaagatggcaagaatgctgggcataattattttttgactcggtgagaaagtagtacctgcacccagtcagttctaacattgtgttctgtaactgtagtcctattaagtggtatgacattacaggacaccttccaggctactactgagtcaacaaagaagacattctacaaaagcaaattctaaacagaaaaaaagaagcaaaccaatgtatatatggttatagttatatacatagagatgaactaagtttcatgttcatgaatattgtctgatgctttaacccccaaatgatatgacagactttggaaggtcctccatggagactaacaatttaaaaaaatctttgaaatcaatgctaattataatattagtttccagatttatgttaagtgatcacagcttgcagaacagattaagctattagggcagatacaaagaagcccactatgatttagtagataggcaatgtttgctttcagagggaatactacacctaggggattacagagtggtggtgttatggtctggaatgacccaacacactccctctctctatagaaacagggcctataatctatgatttatgaatggtgaccattgatcacagactgagtatgggactattcagatatacaactgatgtcaaatgttctcatctatctttgcaaagacattaagtgttgattgtccatggttaaccatctctgatgtgcagttagtttttaatgacaccaggtggaccatattgatttcagattaactacctccactcatatgatttctttccatcctgttgccacctgtttggtaccaaacccactcaactgtggaaattgacagctggttcttcagtggggactgatgggagcagaagtcaggtgaaaatggctcattagcaatgaaacggaaaaatctgcagacttccctgaggatatcttgggtgatgtgtatgtctcctaaattgcccaatggagagttaattataaaaataaaatagcaattttcaatagttttataggttcctatgatgtggtaacatactatttaatatgccaatttatgtttcttttaggtgagatttccatcttgatatgaattttaaaataacggctgaagataaattctctgatagtttggctttcagagggtggttcaagaggaagtaacccagactggcaagtgggcttgtggcactctagtcactcacacactgtatgaagtcccacagttcctttaactctagtcttcaacaatatatcaagagaatagaaattgaagcccatgacaatttgattatgcttgtagacttatttcaatgtcctgtttaaactgcttaagcctcttttgtcctagaatgcttaaattatcaatagttataaagctttatgcttggaattattattattattttgcacagttatttctgttatttaatgtggtgacacacacacaaacacactttttagtaacctagtggtcatagaatatttcctattcttcaaattacagagataaattatgtgtaaataataaatgttattgttaggtgtgtgtgtagtggtgcatatctgaaatcctagcactctggtttggcctaagtttgaatccaacctggactatatagtgaattccaggttagcaaggatactgagtgagagactgactaagagggcaaacaaacaatcaaaaatcaaatttcatacaaatcataaccatactaacagcatactgaacaaagcttcatacatgcaaaaacaatcaaacaaaaacagtggctcaggtatggtggccttctcttcagaccatggctatcagagcacattcttatattagaaactggtaaaagaacaagcctgaatcagaccagcaaaggtctgaaaataaacttttctaaagtctctctggttctgttcttgactcctctctcatggatttgtactgccttctgaacttgtccattgcccggtggcccagggtgttgccactagtgacagtcactattagatagaattctattctacttcaagatgagtagaatttcctcctataatcctgcttgacatcctctaagggaggagggaacagagggctgtctgcagtggatgccccagccaagaatgaacatgttgttgaatcattttatttcataatacaatgaaatccagaccatcctcgtttactgccatgtgtcacaagtttactacatgtaacttctctctgcaaaaaaaaaaatacaaaaaaaccttttatctctgtaaatccaatgtcacagaacaaacctgccttttggaccagcaaatcccttcaggagagcgggagcaggttgcaatggggtttagcagactttgttctctgtaaagtgcaagtctgtgaggggcatcagggctggaaaggtgtttcctgccttccctccataggcaccacagctgttagcacttctggtgtcaaggcacaaatgtcaggcaggtactggtaatgagctaacacccacagaaagtgggccagcagcctggcggcatgccagggcagacagtcacttggttccaggcttctgggagttgggcttctgttgtcactgtcctctccaattgctcccaactgagctgggggatttgcttcacactatgggataaaagagtatttcttggctctgttaaaaagagtaacttttaaaagcaaagactcatttgagctttgtgtaatttataaggatgtacactgcgggaggaaatggtttgaattaaaactcagtttctctaattatctttcctcaagaactggaatatatgaaaatttccaaatgcagaggtatgtaagtattcatttttgtaattctatgagaaataggacatttaatatattctcccaatctttaagaaatgcaagagcactttagaaaaatgtagaggatttcattatctctctcccttccaggccactggtatggttttgaccctggccataagagccaaaagccacgtggatgtggatgatgcctgtccttgggatgggacataagagttttgaatattggcaaactgcctgtcagcatcaatgtttttatgatctgcagtggccatcgtctttcatctcagaagatgatttaataatcattttgtcaacatgtggaggaggatgtcagtgactttggagcaaaacttgtatattctttttttttccagaatacttgccccaccataagctaatacttctaaaatatgctttaatatgcagttaaaataatagatattggttgtgtatttatcagttccattaaccaggttcatacacacacacacacacacacacacacacacacacacacgagagagagagagagagagagagagagagagagagagagagagagagaagacagacaccttctgagatgcctaagatatcagctttggagtctgtcctggaacctgctctgtagatcaggatggcctgaaactcacagagatccatttgtctctgcctccagagtgctgggataaaaggtgtttgccaccactgtccaactaataatgtacattttacaatatatattgtattaataaaactttttgctaagattgtaagtggcattgaaatgaaaatcaataaggtgactataatgttaggaatcattcaggaaactagagaaggaacatgggaagggaaaagggaaggaatggtggtctgagactatgagacattactgacaacatctatgggagaggaagtttgcaagtgttgtgtgggggaggggatggtgatgggagggaggggaaatgaagggacagcactaaaacaaccaacagatgagaatgtcacatggaacccagtcacctcgtggaacaattaggaagaatgataggaggatggtagctacattttaatacagtcactggatgttttctctttgtgaatattgtaaatatttgctgttttcttgaagtgactttaaataaagctaaagtttataatatataattacatatcacagttatacataagtataaattatgttataaaacctctctatatatgtatacatatgtatacatatggagaaagaagttaagaccactagtgccatcacttgccttctgtcagcagattttaaggatggagcttctgtttgtccatctaaccaatccatgaaaaaggatttctcacgtatcttacaaccaaattgtttcacacagcctttagctttttctttttcattgttgttttctttttctgtgccttcttcatctacccagacttatgtcaaaagctaaaccacacaaaacaaatacaaaagctccatttttgcctcactttgcctttttgtattgtctgatgttttggtccaacacttgccaattctggcattgtgactcagaattaggagctgattctggccttttctttctccaaaccagagttcacactggcaattgtctcaaagaagaaggtgacagtggtctcccaatagccacacctgtcccttgacttgtgcttgaacagaacctctttgtagccttgtgtcaacaaacatataaagctaaactttgaacataagcacttaaaaacttctattccccccaaaagaaattttgaaaatctgtaattaaggctgttttcaacacattttccaacgtaatcatctgcctttctctcttctcccggactacttactaagccactgtgtttgttatttcctgacttacaataggtgcatcattatgtcggcaataacagctatgtcttctctctattatttggacactctaagtacaatatgaaagctatcaaagtgacttatgtttgggagctggtgataggtgtagactggtggaatcagggcccataagccaaaaattatccattgtccattatacataatacagaatgtctctttcttaacgatactgttcacaccacacaatggtcctacaataacaaatatcctgatattatggagattttgctcatggcctctttccacacaaacatggagtcctacatcatcttttgctccatttctttgtcctgttggttattcctttataccagtgaggaaataggatcagctagctggccctgtcctcagatatgccaatcagttgctctcaattttcattttgtttggtagctttctgattacagagaagatatgtttccctctctaccagacagtaaatcacccactctaaacatggagggatgataaagaaatagcaagaataaagatcttaacgatttgtgtacaatgtattgagatgtcaccctttgccccattaatgtatattcatacaataattaaaatgatataaagggctgaaaagaagattcagaagttaagatcttgcagtactcttgcagaagacctgcgttagattccagaacccatgaaggtcatctcactgctgtctatccatacagctccagggggaactgataactttgacattatggacacttgtattcatatgtacatatgccctacctcagaaacacactcatacatataagtaacattatttttttttaatttaaaaatctttttaggaaataagaaagatcactaatttttttcatgagaaaaaactcacctttataaacctgaccaaatatgaatcattaaaatgagatagcataagcttaccagggcatggagggacatgcccacagtcacagaatgaatgaaacagaaacattagtgtccctatagctatcatagcaatgcaactgtaagctgcattgagattgcacatcacccatcgcatcaggaggacagccattaagaacatgtgtgtctctgcttttacattcctaactcaagcattttctttagctcttttttttccccatttgttttgtcttgttccagtttgtatgcttttgttttattttatcttactttattttgtttcattctctgggtgactgttttataacaagagactgaaatgttgtggattcctataggagagaaggttcgggattttggaggagttgggggaggggcaccatatcagaatatattgtatgaaacagatctattttcaaagaaagaaagaagaaaggaaggaatcaagatagatataaagaaaggaagggagaaaagaaggaaggaaggaaggaaggaaggaaggaaggaaggaaggaaggaaagaaggaaggaaagaaggaagaaaggaaggaaggaagaaaaaaggaggaatatataaaaactcacacaactggaaaggatgcagacaccaatggtgagaagtaaactactctaactactaaggatatcagtgtggtgagccctcaaataactagtaacacatctactgcatgccccattgtgacacacttgagtataaaaccactggactctaaattaacaaatcagaactatctgcacactgataattactgtgacattatttaacaaaggcaagttatagaatcaactacatgtcattatagaggaatggataagaaaaagaagtgaatatacacaaggagattttgaatagccacagggaaaggtgaactatctcacttttcagaaaaattaatggactggatattataatattaatattaatgtaactaggaaaaactgatattacatgttccactctttgtgggtccaggattttgtacatatacctgaagtcatgtttatggatatgacataaagctagaagagaaaccctcagtgaaaccaaaaactataagtacttatagatgtcccgcgctaaccgccttgccagcaaaaaacgacacggggacactcctcaggatccttctgcagtaaagctttaatgcctcttgagaggaaaggcattagcttacannnnnnnnnnnnnnnnnnnnnnnnnnnnnnnnnnnnnnnnnnnnnnngggcagagactaagggcaggaaagttacaaagttacccattgcgcatgcgcacagcttccaatggctccttacatacgcaccggctcctaacaagtactggggacagaaagaggagtgtcagggcaagaggaatgtgctggtttaatgtcttttcaaaacccattgctctgtacaatgctatgcaccaactttaaaaatggagaaaaaaatcaccaaagacaaataaccaaaataaacaaataaatacaatgtgccacagggcagggttaagagaattacgttcttctggaagtcactatttatagagtcatgacccacttttagaggagctttataagactgaatatatttcagttgtttgaactatgtcgtaacacaagtgctcacacaccattaggctactaggaaaaattgaatttgctaattaaaggaatagactgactgttcagtctaacttgttccattagttatgtctcccaaggataggtatacttttgaaactatcatcgttcactttctcctgtatcttttcactacctggatcttgaagtttgtagatgcgatagatgacccaaagtccttccatttcacttggatagtagctctttgggagttatcagagttcagatccacctgctgcattaggcttccagactcctttgctcctggctgttgtctttaatttgcatctggcatgccctcttcctagaatatctttttagcatcaattccttatttagtctacaaacccagggcacaaataaaactgaaaagttacaaaataatggcaaatcttctaaatatgtaaacaaaaattctaattaaaaattgtgagaataagtattttaaagttcttgatttttatacacaagttttattttctttaaaattttaaaattatatgtctttgtggtggtgtatgcatatgtgtacaaatattgtggagagggctcggaatccctagacctggagtgtcaggacactgtcagcccatggatattgctgctgggaacaaaacttaggtcttccagaagagtagcaaatgttgttaaacactgagttacctctcaatcacagacatattttagaaagtatctttacaatcataatatacaatattaccgaatgctagctctgtgctaatcaacactttttgtgaaagagagaatttgaggatcttacctctgctatttcatctacaacctgttttctgtgtaaagccaaagtgaggtaagaagatttttgtagagctctaaatgagtcactttgtcctctattcagaggtgagacttttgttgaggtttcagcgctaacactctcttagcacattttagctttctgatgaaattctgaacttagaataaattactctgttggtatattaatcttaaaatttacagattcaagtgtaaagttgataaaaaatatcttgataacaagggatatgaacaagtatgtgggattatcaagaattcagctggaaatggtgggaactatgcacagatttcctggtaacctgtcaatagccttagatgttggcttcatctatgattgctgaagttcacttggttcatatttcatttataaacctattagcttgtttacttaaaatcatagcaaaagtagaaaacaaaaacaaaaaccttggagacttttgatcaagtggcttcccagcagccagcaggttatgtttgaaatctgagtgctgtcacctcgggcctcttctgctccattctgattccttctgagcttattctgcaaagaccacattttgtgcaacctattataagaataaccatttttttacagcgttacttcctcctttttaaaacctaaggcatcatagctccatgtttacaactccttttttgctttgggagcctggataaaataattggtctgacttccatttccactatttttcatagagtttgtgagttgaacattctgtaatattccttggaaactaacttaatcttgttgaatattctgaggatctcatagtaaatatgctaatcgtgtcttatagtaacccaaagcaggacagacatgaagaaagggcatgacatttgtgtctgatgtaaaatttgttaaagcagacagagtagaacccatgttcttaagtataggaacatgacagtgactttttttttgtttttgttttgttttgaaacagggtctctatatatgtagctctggttgtcatagaacttgcttatcctagaacctgttctggaacatgctggcctcacactcacagagatccacctacctctgcttccagagttctgcaattaaagccctgtaacaccaaccaatgcagaaagttacttctgaatgagaaggaaacacattatcagacagacatcacatagaggcaagatatcctttcctgtgattcatacatgaaatgaaacatgaatatgtcaatgagaaggttacaaagaacacagtactgtgattgctaacacggatgggacttaatctcaaacaatgatacaaggctggtgagatggctcagcagacacacatggtgaaaggagagaaccaaatcctacaacttgtcctctgacttctatagacctatggtggtttataacctcacaagaaataaaaagtctgtaatttaagtaagtgaatgaatgaatgaataaatgaatgcactttttgaaaatgacgatgcgtaagttatctatcacacacacacacacacacacaaagcaagtaagcagttgcatgatttttcaagaaaagacatgatgtctttaatcttagtgcttcacagtgaatttttttcattttaaaatgtcactcccattatgtaatacctaattgcaattttgatttttatttgtaggattgattgatgtaaggcatgtctttgaatttcattgagatttatttaatagatttcatataacatacttcacttgtgaatagtaatcgatcataaagcatgaatttgtgggcccagcattttacttctggctaaaatccagtattattcaatagtgttgtattatctgtagagatacttcaggcattgggaagtcctatagaggatttggcaagttgtgtttatgtttcgctaataagcctaggaaatgtgttcagccacatataagataaataaaaatatttcttaatcattcttcccagtttttagaactattagagaatggtagatattggtatttatacacatgcatatggactataaattgagatgattacttcatggatgtatggatacaatcctcagattatgtttaaaatagttcaaacctgaaaagtttgattattagttatttttctaatgtacaaattcatttatagttgtatttacaaaagatatccagggaaagatgatgatgctgccaattaataattaacaaaagaatcaagaggcaacataataattacctaaaccaatttggcaatgtgtgccataataattataatttcttgattgctaagataatgctatacattatgtataaatgagcttctggtgacagttatcccatcatagacagaatccactatgtccttggcccaggtctagttagtagacacagccagcccttctcaaactgagaccccattttcctgtcctgtctgtgtcctcaggcctgtatggagaagtagatgctcagcttattttgctgctgagatttttgttcagggtcttgtgtctagagtctgtgagctcccacttgctcaggtcagctctcttgtgggttttcatgtcctgctctttactcagaaagagcacactcagaaagtaacctttcagtgaggtttgtctgtatcccttggttttcttgagaaaggggcattgctgggtatccaggttccttttaccacttcctcctcagtgctgggaacatggacctgtacctctcagttcgtggaagattatgtcaaatacaacaatgatagcacaaaggaaaacatctaattttcttaatatcataacactattatctgaaactagcaagacattttacaaagctctatatttactaaatatttcaaaatagatccaatactaagttatatttattcctctggtaaaaacccaaatgagagtgtttcacatttacaaagcaagtacaaaagggctgtaatggggaggagatagggcatgagaacatgaggcaatgggatggttgaattgcaggagagctggagtgggagagcaattagagatgtcttgataaagagaggcattgtggggttagggagaaacctgctgctagggaaattcccaggaattcatgaagatgactccagttaagactcctagcaatagtggtcagaatgcctgaattggccttcccctttaaccagatttggtgactaccctaacagtcatcatatggccttcatccagtaattgatggggaagcagatgcaaagcactgggctgagctcctagggtccaatggaagagagggaggtgggattatgtgagcaagtgggggagagtcaagagcaggacatgaaaacccacaagagagagctgacctgagccagtgggagctcacagactctagaccaacagccgggtagcctgcatgagacccaactagggcctctggatggggacaacaatgtatggcctggtctgtttctagaacccttagtagtgggaccaggatctatccctggtgcatgagcagggtttttagggcctattctatatggtgggatgcaggggtgaggggcttggtcatgcctcaattgaatgtgctaggctttgttgactccccactggaggccttaccttttcagaagagtagatgggttgtgggttgaggggaggaatgtagattgggaggagaagagggagagggaattgtggttggaatgcaaaatgaatgaaaaattttaaaaaatccttacagcagttggtctgggatggagggcccaccttccctcattatctagacaatactaagttgtttctctctattaaccattttatggtaacagtacatctctggaatgaggatgtgataatgacattatgggaaaactaaacacaattagagaacgggagcttcctttatgtggtcataaaattacaaaatgtaacaggctcactgttcagatacatgatacatcatgactcaatgagaataatgctaactgtatttgctacttaagactaatcaacttgttacattattagaacacaagagaaaatcaggtttgtcttcatcttaatatatgcacaataatgacagacttatctatatagagaatgaccatatatattgtgatttatttatgcaaaccagaagtacagtctatggaaatatccagttgaattcataaatctcataaaattattttttaatttaaattagaaacaagcttgtttcacatatcaatcccaattccctctgcctcccctcctccccggcctcccactgaccccccatctcatcccctttctgctcccctgggagggtaaggccttcaatgggggatcttcgaggtctgtcatatcatttggggcagggcctaggccgttcccaatgtgtctaggctgagaaagaatttttctatgtggaatgggctcccaaagtccattcatttaatagtgataaatactgatccactgccagaggccccatagattgcccaggcacattcagggaatctgagtttgtcttatgctggtttcccagctgtcagtctggggtccatgagctccctctttttcaggtcagctgtttctgtgggtttctccagcctggtcttgaaaggtacaagatctcctgagcaaattgggagaatggggggaagggagagggagttaggagaaagagatggggagaagagatgggtagaggaggacttgatggagcagaaagtttgagtctggggaagaatagagaagagcaaggaaagaggtatcatatagagggagccattataggtttaaagagaaatatttcactagggaaatgtccagagatctacaagggtgaccccaactaacaatctaagcaatagtggagaggctaccttaaacaaccttcccctataatgagattgatgactatcttatatgccatcctagagccttcatctagtagctgatggaagaagaatcagacacctacagctaaacactgaactgaactcctagaatccagtttcagagagggaggagagatgagcaaatggttcaagaccaggatggagaaacctcataaaattcttaaaagcatttgagaaaaaattgtctgatgcaatacctagtattttgctattctatttatatcagttcaaagccagacataatcacttgcattatattggatagctgttggctatcttgttaaactagcctttaaagttatgaaagtattacatattttgaatgctatgatggttatgcaggtgtatctattttcaaaactcatcaaaatgtacaattagtatgaataaatatgaaggtatataatgtacctcaatataaatcagtaggcaaagaaactgtcagctatattatgaacatcttccagtataataattgacatgaattaaattaatcatatgactaggcatttagagtgtcttattgggtgtcaattttgcatcaagttttagaagtgtttgaacagtattctggacacttggacatacactcaagtcttcattttctcccttattaataccaaagtctcccaactgaggctagacattacaactctggtgtagttttgaagaggggcattcatccatgacctggtcttgccctctgctgaccatctgtaaccaggagaggagaagtaaataggccttagtttgagaaggattggctggttcctgccaatcagaaccatggaaattgtagattctacctatgatatggcagctcttatcattagcgtatctgtttatcattcataacattttcttgagggttgatatctgaacaattgagaaattataattattatggcacacattgtcaaattggtttatataattactgtgttgccttatgattcttctgttaattattattcagaagcagtgtctttctctagatacatttagtaaatatacatatgtatgcagtcatatagctgaagtataattagcattaatcaacttgctcatctgaactttttgaacatattttgaaggttgtatctgtatatccatgaaataatcacctcaataaatattctacatttctccttatttctttttctttcctttcaataagtaaataagattaatttgtctataagtattatagattactttatatttattggcttgttatataattgaaacaagaattattctttttctctgaaacccagaacaaagattttgagaaaaatatgtggatctgcagttcatttctcattatattcagatagtattacataaaccattgtttactaatataataactaactgcctatattcaggaaagttggattcgtcatacatgtatatgaattctttttacaatttcttaagtgtaattctcatgaattaaactggaaacatttaagaatttgacaataggcaggcagatctctgtgtgttcgaggccagcctggtctccagagtgaatgccaggataggctccaaagctacacagagaaaccctgtctcaaaaaacaaaacaaacaaacaaacaaaaagaacaaacaaaaaaagaatttgacaataatctgggttttcattataaatggccacttaaccaacaccctaaaaagttgagataaacaatcagtttgatctctattcctttggttattttctgggacctggtgtaagaagacagttacaaagcaggaagcaatggtattgatacaagtaagattgtgcaccaactgcgattgataggcacaccagagccttaacaaaagatggctacacctgtctagtgtgtcccacatagttacatattagacccttgggcagtttcaggactgcaaaagcacatgagataactacagatgttcctaaggcagcatggacaggatcctgggacactggaggaataggagtctactgtctggagaacagctcctggctgtccagtgctttctagaacccagaaagtatatgttatggtgtgaagctatgaactatactttaagagtaagccaaaacctatgtggtggttcatctgacaaaacttttgaggcttgtgtcattgatgtgtgaaccaggaccaaacacaacattttagttatgggacagaatctggaatgtcaaggctttgtatttatgttttaaaatattcagcatgcccccatcactaaacatttaaagaaataagaggatgtaactgataaaaagtaacacaatagtttacacaatgttgcatgaataaatgcatcttacgctaaaaagactttcattttgtctcttactagcacattaagaaaagaaaaatctagatagctgatggatgatggagttttctaacaattaattattgtgccttaaaatcaaatttgtactttagaatgggaaagtttaacatgtggctgaggaaacaactcattgttgtgtttaaaatcaaagtcaatgttgccaatgatatttgtgaagttaagaacaactcaataccaaatatacagagtgaggctggaaatgaagattacaaatgggaggaatatagagtaatgagcgcaggaacactggccaagtcctttcaggagaaacacagactgcagaaggacatactcagagcaaaatcaatatttaaagagatgatgaatggatgttttctctgtgctgttacttctattcactgtgaagaagataattttattcttgacttcactttcttgtagtactttttttgttttgtacttcttcaagatcatggtcgatagttattaattgtagtatatctaggcttagagttcaattatcaaagaaaaataaaaagaaatgaggccctctcaaggtcttacaggattttgaaacttaaatttttactttgccaaactaaaaatgaacaccatgtggtttgtaagaagttctcaaaacagccttattaaagagagtgtattttttgcacccttttcttgcatttttttgaaatcactataacaacattcttatctgtggaatactctggtcttctatctacagtgagaaaacaaaatgttcagttgtttctctgcttctaatttaatgcaagctattcaacaatcctttagttgtatgctgctatgtgccattctcaaattgtagaagaataaaggaaatatgtaactcaaatgtaagaagtttggatttatggttgcttctaaatggaagcagaagacaattcctgcagagaaagtggctttgctgttctccattttcctgacagtaaattagcttttcatttgaatgttactttctttcagaagactttgatgcattttaagttgatgcagccgtgcatgttattaaagctaggaatcataaattattccttaaatcattgagtcttgggaaaacagaaagccagtgaatgacattccacttgaatattgatttggtttctgtgaagcttacactggttctggcctgtttggctccagcaggtctaaatgctttctaatttgtttgaaaattgcgtgaaaatatccccatggccctcttgtaaaatatgacagcctgacattttctttaattacaagacccaatctgtttaatagcataaaattggcctccaatttgacaggcctcccctttaaaatcaatggttagactctagggcaccagcttggtcatcaagatcaatatcaaaaaaatatagcttgtcaagacctctcagccttttattgattcaaatggggagctgcttacagactgaatacatgttagtgctcagacccaacaagcacaagcctcttgcatgatattcaggttggaaggatagatagggctagatgatacaagcataataaaataatccaagatatgacagtcgtaaaagctgtgagttccagggaaaatacaaatatactttaccacactttgaaatatttattatttgaaaatttcatgcataatatatagtgtctcttgatcatatccactcccccattcttacccccaacacatgagaccctcaacacatcccttccatcaatatcttacttaatgtcctatgttttaaaaactaaatttcaatgtgcaaaaaatacatcaaaactgttaactttgtgttgttaaagagaacaagccaaaccactgaaatttctctggaaagttttctcactgctattccacaagggaattcacagcaaaaagaagaaaaaagttactaggaaaatattttttctagtttagtgctgaaggagcacactgctgccttggtgattaagctgggccaggccttgattttcatactcagctctttcaaaattaggttgctatctgtttcatggcatttgtctaactctgagttagaagcacccatccatccatcaatagcacttcatgctccacttcatcagggcttaaggcaagaatcatagtcacctcacctttatgtctaacatgaatactaacaaggaagaatgcaagttaaaccaaagagaaaggaaaaatgaagctaggcccacaaagtgaattatctacaaaatcaatacagatcaaaaataagaacttactattcttttaaaaacttaaacattgggtacttaccaccactgaaaataacattgagattgatcaatggtgagatttttattttgccacaattaattttaagtgcagaaaaggtgaaatttatattttgaagacaatatacctcaacaacccacattgtgtgttaacttgaaaacaatttgctatagcttatgggtgtttgttactgcagttaaaaatccaccaagtgtttatcagctgtgatattaggccctatttttctttacctcacttacatatgcatgtgttctataattgctctgtatttatgtgcattatttgatctatggttatatttgttttatgaatgcacaataagccagaatgtataattctctaaagaaaagaaatacatctagtatttgacaagttaattctccaacccaatgtgcagagaaacttaatatcttacattcagccacataaatgtcagtttcagaattgggattctgagctgtatacagcttttcatgtcttagagaccaaagggaagacctttatcactgacccatgggctcctaagtcaaacattgaataaacattttcacattttcaggaagtgtatgaacttttggattttaaacacattattgtttttacaggtaactgtcaaagattataagccatggaggatacgcagaatcggcaagcttcctcttgcctactgaggaaggttaagtatctaatactacttatgctactgtggaatgtttaagttgccaatttacaaggaagaagcagtcctcccttatctcaaacacatgggccatttttaatgcaacatatcaatgaatcagacttggtgttccttttttatttttataaatttgaggcaccaataacccagaaactttcccaagtctcaaaccttttctctttattcaattaaaattttacagaccaccagctttccttgctagttttactgtgacatatgctgctgagcagtcttctgttcagagaaatactagatctttccaatgaattcattaacttatgtacttatcaggtaactcagtaggaaaagaaaagtcaaataactaaatcattttagctcagatctttgggttgatggcactaaaacaaccactgttgaagtatcggtttttttctcttgctccttctcacagtggtagtcaaaagtgacagtcaaggctttctataacatacaacagacagtgttcacattataacacccaaagacacaactcaagcacactcaacagtcataaaatacgcagggatataaatccttaacatctaaactgcatgaagctgaatttgtgaataggcaaaaatcccacaaattatggaaaaattaattttaaaactacttagaagacatacttggattttcactgtagtaacaattgttaaagacaaaaccagaatataacactttctagacattttatataatagaataatagtaatatgtatttttaagtatatagagcctgttgtatttgtgacaattttgtgagtacaatatttaaacaaagtcagaactgaaagtatgtcactatggctaggaattaattgtgctcacatttataaatgtagttattgaaacaccatggcagacaaaatatgtttcaggctattaatctaaatctcatccagatctctgtcatatatgtattctccaaagagttcagatatccagaaatgtcttttttatccatggtgttacatgaatgtgatatctctccatatattgaggaagcttctctcctataagtgcacacatgatcaagctttgagttaatcatgttcagggctcaaatttacaaacaaagccaagaacaaaaacagctttctgaagtctgtctgtagttcatagctccaaggaagatagaggaatgcatagaagacaaagcttttaaaaagaaaaatgatgacatctaagtcaggaaatggctcagcagatgaagctgcttgctatgtattcctttaaacctgattgtcatcctagaacccaagttgaagtagaaggagagaagtgactccacaaagctgtctttgataaccacatgtgccagtggtaactctgaacacaaccacacatatgcacacacacacatgcatacacaatagagagctccatatttatatagacactaatatgaataataatagttaataatgaaaaatttcagatactgaaatctactgtagtgaaaccgtacccaaaattaaaaaataacaaacaaaagagaaaaaaggaaataaacaaatgataaaggaatccaacatataaaaatttattccagggataattacagacactttgggagcccttagaagttagccaaccatcttggttattaactagtgttttatgacgtcttgtattatgatacagtggttttattttatttcttttagagcatagatcatctcacagagaaaacagacaaattcaactttatttcctccattgtgatagacgcataatatgtaccactgtgagtgtccctgttaatttggacatgcgagcaggatctgtatgatgatgcataatggaagcatgacaagcatgcacctgtttccaggcacaaatctgcatgaaaaacccagtaagagagcatcagccccatcatataactatctctcttccctgcacacaagtgtttttgaggcatccagcaactgtttaggtgtcatcaggcaaatgtgactttattcattaaaaggtcttgtaatctcctcggctaggagaggacaagtgaaggcaaatacatccctttgaaactgtcattttcatcatgactttgtgtctgttaggtcacttccctagagttcaattgtcaacattatcacactgcttttcccttatggagattaaaatctggtagagctctgcatcagatatttgacattcagagtttttatttttaatactgtaattatgaataaatgttgcatctttggggaatgcaatcatcattgcagcaaaggagacagccacctttctgaagtagtttagtgatgctcactcagtaggacagttctcattggatggcagcaaatctcatttaaagtctccacatcaaaataaaaactataaaagagagggtgaggcaacaggacactcagtaggtagagggattgctactaatcctggcatcctgagttaaatacccagaccaatgtgatgggggatatttgataacactgtgaacccaaagtttgcatttgcattaattaaataaaaataacttttggtcaaaaggcttcaagcaactaattgacagaaagtaatcatagtgtgtcagaggccatccaggaaagatagagagacaaagaaaataggagggtggggtttcgagtgtcacagcttttttttgtttttgcagagtgaaagcaagggtcttcctgacaccagtaagtaaagtgggttagccagttgctgctcagccgctctgagcacgcagattttcaccctagcctttgaatctcacgtcttattcataattagaatgatagtaatttagttaaagtcacctttagcagcagtgacatggctggtgcctgcaggagcagaattctttcctggcttctgcctgaatgcccaggtagtttctagataagtagagttgcacttgctgtcggagatagcagtggaataaggcattgtcactgtgctgaagttaaaacaacaccaatgtcagaatgggagacctgactcttgtaagctatcctatgagttctatgaacaccatggtgagtgcctgaattctagtgcatgtacacacacacacacacacacacaacacacacacacacacacacacactcttttaggaaaacctaccatggacttaaatctgaatatttttgaactattttccaaactcaaagcctgactttaaaatttcattgaatccactataagcaggcttagaaaaataactagaaaattttaattatcctcagcataaagatttctttccatggagcttgaaattatttttaattaatttatttaaagaaaggtatctgtactctttaataacatatgtatctttataaaagttatatatacataatttaattttgaacagattccttttctggcatagtgtacagaggccatgcttattgatggagagggttacagagaaagacagaggtgtggcaagatgtactggagaccttctctcctggaggtctctgaatactgacatggagacagagtctgatgggattgtgtgtgaaggaagttagggcacttcaaacaacatataaaacaattttctatgctgagttaagtctctgtcctttgtaatgctcagaaaaactgccaattagttttaagttatctcatgtgccataatatttaacaaagtagaaggatggagaaatgagattttgtgtggagacaggcatttgcatgtgagaatatcctgaggacccacctgtaggcttcacttagctgagagaataagctgagccagcccacgcatgcttcatggtatgtttattagaaactatgctgttattgaggtgtggatgcatagaacacatgaaggaagctggagaagtactcctgccccaacaccagtctgattgcatggctcctattttcacaccctcaacatcacctctgcaaattaagatgccatcagcaggtagaatgtggctcaccaccagtgtaagaatagggagcactgaggagcacttctcaagtactgtgaacaccaactgtaaccttgaaattgttaaaaactgaagacaaggtagagccaggtggtgcttaatgctacttctctgaacttggaggatggtttgggttaatacatttacttcttccttctgctttaacacgtgtcatgccctatctttggtaggtcacaagttggatataattatgttgttccttaatcatcttctctaatttgcattaaattgctttgaagataaatgtatctcaaatttgtaatactaattaataattgtacagtgatctgtcatgtgcttggtttctaagtttagcatattatattggaacattctgtgttcagagtgccttctgacacagatttagagtctggtgcttaggaactgatgatgacaccagactatttcaacaacaatgcccttgttaaatgcattcttagcatttaagaactcaatccctgctgcaatcaggaagaatctgaaagatattcaagggcctctaccaggcacaatcatggcaaacacaggccacagcatggcaaacaaacactgaagacaggttttgaccttttaactcctcccacttctagctaaaaaaaaaagttacttttcttaaactagctcccaaggtccattcccttatttggtcacttctttctcctgaggctgacgaccaaagtccagctatcttaagtattgaagtccaataatcaaaagcctcctctttgcccccttaattaacatgccgaatggaaattaaacaattcatccgagcatatggtctccgcttttacctttataaactaccatggcctgtgggccacgtctgtctgccctatctccagaagcagtccttcatccctctagaattaatatccctttcccttctcctttgccccccctttcctctttcctatagtgggaaattacaatacaatactgagtcaggtagaaatacaagggtatttaatagggaaaagccttacttgccagctggtgtgccagcagtctgtccagcaagtacaaaagtgaaactgaaagagaaacgcagtccccaagtgtgttcaggaacacctgtagccagcccctaagcaggcatggctacagcttcccctacgccttcctttgtctcttctccttctctcttgtcctctatttcctgtctttgtacttcatctctgcactctgtccctctggagtaaataaatctctattgtgctaagaacttggtcttggggtgtcttgagttgannnnnnnnnncaaaatagaggagggcaagaaaggagatgccttgatagagggagacagtacaggttcggagagaggtctgaaacaggggaaatgttaggagatccacagggatgaccccaaataagaagccaggcagtggtggagaaaatgccattgatgcccttcccctataatgagattggtgtctaccttggttaccaatcctagagccttcatccagtagctgttcaaagcagaaacaggcacccacagctaagcactgaaccatactaatggaaaccagttgtggagagggaggagggatgagcaatggagccaagacggtgctgcagaaacagttgacctgacctactgatagcatggagaccctaagtcataaagctggggaaacagcattggaccaaaccaagccctctgaatgtgggtcccagctagggggccaagacagtctatgggacctctaaaagtggagccagtctttaaccctagagcacaagtggactttgggaacctattccctatggagggatactattgcagcccagatacagcaaggagggcctaggccctcccccaaatgatatgacacactttgaagttccctcatggagggcctcactgatccctggggaggagtttggggatgggctgggagggttgctggggaacatgggtggatgggagttcaagggaatgggggaatggatatgtaaatatgactaatatttaaagaaataagaaaaccaaaaatatatatttaattacattggatgttaagaaatagtgtttcattacaatgaaaaattttcactattaaactatatagcttattctcaaagtaaccagatattgcaaagctacattacagaaaatacaaggacgaagttacacatgtcaattttgatagtatcctcaaggatactatcctcaaggatatttattctctactttatttaaaacttctttattttttttaaaaactagagtattgtttcatgtccatgtccatttcactttgaaaacctcaagagcaattgattgagtccaaccttttatttctctatatctatctatctgcctgtctgtctgtcttgcactactcaaatacagaattattaatggtaactgattgagatgattttcacatacaagaatactcagccattttacttatattgttcttccattgccaacatgttcatggagttaacaatgctaccattatctaatttgggaaatgtctcactttaaacagaaagtattttggctttggtaatctaattcacatgttagagaattcaaactcttcactgattgtctcaatttggagagcctgcatcatatactcctttcacctttcagcatttagccattgtttccttgttctctaggaatatttctagtactaacttgaagtattttgtcttctaaattgattttcagtgcccaggtacactgcaccccctttctgagtatgcaatgaatatctgtgtatcttttagttttgtcatttgtgtgaaatatggacctttaatgaacttcttattaccattttaccccttgtttctctgctcctaacctgaaaattcacctttgttacttgtgtctgtgatttatttatttatatttgtgtgtgtgtacttgtgtgctatttatgtcattagcattccattgggaaatttttttaaaattgttttccttaaagagatgatgaatggatgttttctctgtgctgttacttctattcactgtgaagaagataattttattcttgacttcactttcttgtagtactttttttgtttaactgacttcatagtgggcatatgtgagtcagcacagtttcattctgaatcagcaacaaatcagaaatctccattaagcaacttgcgtacatgtaccactcttctccaggaacatcagtttacaagggagcttcactttgcacctcttgcttgctcaagacacaatgttttagctggtggtcaagagctgatgcaatttcttctccaggggtctgcttagggctcactcacaggataagtcagattttgtcacagtcctctttggtggccagcttctcctgttttccataaacttttgaacaagctctaagctaaactcagctgatgatatagccttaggcaatggggatgttataatccatggagatggtagagttccccgccgttgtcactagcaaatagcttcctcaatcaaaaggccaccattttataaaactagggatttaacaaaaagttgcaggttaaggaaatatgttccaagggaggttaagatcatgataggaaaaaccacaaagacagccgtccaaactcatggactctggggaacctgaactaggctctctgaaagtgggtgatggttagatgaactgatctgttttgggagaggccctgctagaagcaccaggacctatcccaggtgcatgaactggccttttggcttccctatggtgggataccttgcttggccttgatacagggagtagtaggggcttggacctgcctcaccttgatatggcagactttagtgacttcttcaaggaggccttttcccctctgaagagtggatgggggtggaatggggttatgtcgggaggcaggagaaggggagggagaggaattggggttggaatataaaatgaaaacagaattaaataaaaaaagcaaatatgtcagctatactctgctcgtcttgcttctcagaaatccacttttctggtttgttttcttcctaccctaatttcctgctggttattggttagtgtaccaacaagactgagagaagtagaacaggaataattctaattaaaggtggtatccaaccacacagaatttgccagtcatgacagggctgttgcacacacaaactcacagccttgtgactgcttgcaaatatcagggtgtaaaaaatccctggaggatggaggaaaggctcacatagccccaaccttggcgtcaacatctgtatgttaaactatcattctaaaattaatttctcctgtctcaaataattctcttgagtgatgttttatttcttttgttctgaatttgtatctattttgtattccttaaacaatttcccatttgaagtccttgtgcaacctcaattttgacatcacaccatctttgattcttaacacacaagtattctattctatgtcaggaggggttgagtcagtatcttggggtgtccttgaaaccctggtaatagtgactagagttctgggattactggtcagaaactccatgactaatttgctctatgtttttaatctcactgaattgtgtcccccagatttcatctttttttgatcaagcatatttccacattttactgactcttaacctttcaagacccaggaagaagtatctactgacataggaatactatttttaaaacatttattttcttcgtgtgtgtgtgtgtgtgtgtgtgtgtgtgtgtttgtttatatgtgtatgactgtatgtatatgcatgtttgtgtgtacttatgtgtatatgagtattcttgtgagtatgtattcatggcttgtgtgtctctgtgtgcatgtatgtatatatgctcatgtgtggtatctatgtttgcatatgtttgtgtatgcatgtgtgtacttgtatgtttacgtgcctgtatctgtatatctccatttgtgtatgtgctgctatgtttatgtgcttgtgtctgtgagtgtgtgcaagtgtgtatgtatgtgtatgtctctctgtgtgtctgtgtgggggtgtgttccatggcacagatgtggagttcaggggacagtttacaggagtcagatctgtccttcagccacttatgttgtcagggttggcagcaagtgcctttacccactgatcaatctctctagcccacaggattgtattttgatttagaaagcttcagcattgttccatttgctctaatattctgaccattcacgtatactaattgagatagccatggctgtatagactatttactttggatggactgaaagtgacagccacatataaaagttattactgaagatcgttttcaccacacttctatgtttctaaatttgacatttcaggatgcaccttcctgtccttatcaagaagtaaagtgacaaaggaagttaacccatcagctctgagcctaaaccctaaatgttcagaaagcaacagtagcattgatccactttgcaaaatcccagcatggctgaggatttacacactatctatttgcacttcttctcacctgccgttttcttggtctgaataaatcttcagagcagatggtagaagattgtcaataaaaggcgttgttagcctcagtgtgaatgcactcgcctcagtcaacaccactgtctaaccacctgctcatttattacattttaaacaacctttctggaaaaacagttaaattcttcctttcttgtggagtgaaaaaagggggattttatgcttctgatgcaatagcaggttatatagcatatgttaatcataaatttcattttaaataaactcttattattttctccagctttggatttcatgtttacacagaaaattttgagaaaaatcagaaattcactcctagttcactggacctgaggtagttagaaaagacataaatgctataagaaaaatcacaatattaaaatgttactttaaacattgtatttactatgaataatatttttgtcacccgatgttattatttcagtgtattaagaatatcatttgggtcaatctggtattactataattgataaattattaagggaaaaatcctttgaaaatttatcctttaaatccttcattaaataaattaagaaactaagagtcagatatgttaatgtaattggtagaataatgcaaatacttcatcatggaaaatactcttttaataaatagtttttttatttaaaggtataattatttcacatgtcaaataaagagttttatttttcaaatctaatttttataatattaaagtgaaaaatcagttatacatttggacagagagagaccaaatagaacatcttacctggaatgccaaaaatgaagttaatctatggataccttagttgaataaaggcatgttacttttgtttttgaagcatttgtttaacaatataaagagatgtgctgcatttgtttcaccttgctggcctaaggcacctgattggtctaataacatccaatagctgggcagagaaaggataggtggggctggccagcatagagagaataaataggaggagaaatctaagctatagaagaaaggaagaagaaaatgaagagaaggagagggatgaaccagggccagaagccaggtatccaccagctagcagacagaagtagtgaggataaaatatacagaagaaagaaagtaagagcctcaaggtggaaacctgaaaggtggataaagagatacattctgtaggaaattgttggtgttttgtctctcaatggcccaattgagactgtaccacgtgatccttttgaatggtgtgtctttatctgctacaggagacaggtgcaaactcagtaaggtctctaattctttctcacccaacatccctccaaaagaataatgcagcataaatttaaaaattccttaaatttaaagctctgcttcttcattatgctatctcagagatctttgtaacgctaatccaaggaacacttctggtaagctggtgatttggtatccttgtgtttatccacttaccaacaacagtgggcaccttggaggtgtgtggccaatttgtttttttagtcacacaggtgaattaagttttttttttttttttttttttttttttttttaaaaaaaaaaaggaactatgaccctgagtctggaaacacctcactcttctacaccacacctgcttcatggtcataagagcagcatctgtgtacaatcactgctatgtcacatttcctaaaccaggaaagtcttcctgttttccatttaaaaacaaggagggcaatgtccacttctgcaattttctgaaactaaacacatttaatatttttttcaaacatttggtaagatatccagtaatgagagctgcattttttctaatttcttttaaaaaggtattttctgtttcctgtgatgttcagatacatatgtcattgtcctttgttctcattccccctccactgccataccccacatcccctcttgctatgttgatgatgctcttctccagacagatgctcatctgctttcaagacattgcattgcccgggattgtaccaccctcaccctctgacagacatcctccttccctttgtcagtcccaatttattttgatgtctaacacacacacacacacacacacacacacacacacacacacacacacacacctgttctacatatcagggaggaagggagcaaactttaatttgaaaggcaaagtattcaataatattgaaaagaaacagtgtttgctctttattaatttaaatgtagctgaattccattataggagtataaacaaaggaatgttaaaaaccaaatgtctactagaggagcacctgtcaggagggaaactacaaaaatctgtagttacacatgtgagcagacattatgtaccaagcgaggatctttgcatgaaggcaactgtcccattcaaaactgtggtgagatttgtggaagataagggtaagaaaacacatttcttcagttgttttcactcatttattggatatgttgagaattactaaaagatctttcccaaatgattgacatttgttaagatttgttaagtgctgtacttacacatttaggaaacatgcatgaaaagagaatcaacccagtgatggcaaagtcaaatgagactggccttgaacctaatatgagtttcaggtgtcccagctactcacactttctaggaaaatgcagtaatcccatggatctgccgtgctttgctgatttaattagtcctagtgtgaatcagaagtaagaagatactcattatggagggttgtgagccatcacatggttgctgggaattgaactcaggacctctggaagagcagccagtgaatattttgagaaaaatcagaaattcactcctagttcactggacctgaggtagttagaaaagacataaatgctataagaaaaatcacaatattaaaatggaaatttgtgaatatttaaccagttccaataaatacagaaaacattaatgggacacaggtgtagcaaaatatatatatatattcaatacaattacagaggaggtaagaaaatgacatacagaatctttattaaatattcagttgtgtgtaaggtatgctcatataagttgttatattcaaagaatacttagatcagtggttctcacccttcctaataatgactctttaatatagttcctcatgttgtgatgaccttcaagcagaagattattttcattgctacttcataactgtaaatttgctactattatgaataattttgcaaatatctgatatgcaaccccaaagtgggttgagacccacaggttgagaaccacgtccttagcgttgttattacctcaactgtgtaggattcaaaatcataaaatgatcaagtttttaaggaaaaacagagtagtccgcagtggaactgagaagacaaatacactgattagatttctagtatgtgtgtatatatgtatccatctatagtcaacccgttaatcatcagtcgatcttccaatctacacaccccccttccatccagacatctatgagcagaatgtgccatacatgatatacactttttataatattcagtctagtgttccgatgactcccaagtaattccaggtcccagggagaatgcaagtatcttctggagttgatagattaagacaaattcaccaactagggagtcctgacctggatatttagctctttcaaatatcaattaaaaaatcttattatgtaatattttcttcataatgacacgctattttaagcagagacaccttaatgaaagttgttttaataaggcctttaaagtgaatttggttttcatgcaaagcgtgagacgtgataagcacgggggctggtgttcttctaatcttccatagataatgaaacttagaaatagcacggcactaatcaaaatcagagctactttaaagctgtagccatcgcccttggtgattatacagcctgacaaatgccagtcaagaaaattatgtatcttgaaattgacacagagcagttagagatgccacctgattggaaagctcaaggtggaatcaaatgcagggatgcaggcctgagataaagggcttgctgaaaagagattcaaccaccaggttcttccaacatcagcaccataatctcgagatgaaatgacacaattttcaaatccataataccctttgcacattctagaaaatttcttgtagaaatgttgacagagttgactgtctaatttggtgaatatcagtgagctgtactaattggctaacttcagctatgctttaatggtaatatagtcttgttttaaaaagggaggaacagtttctataacaatttactttcatttattccaccagttaattgcccatcatcatgtagttcattttctgcctgtgcttacatggcacagagacaaaggaaatagatttttcctgttcattttcccatgcaagctttgtcataaggtgcacaatgccgagaacacagagaccaaagcaaagatgaggataaagggcctcagagtatgggaaatgttggaaaaaacagccctttccttctcattcatgactataattattatcacatctcatttcatggtatgggttggtaatattaaaatcattttcaaaagagtaatgatgctgcaaggtcatatgacgtggttagtaatagatactgtgcgcacattttcaaagtacatgtgggcaaatgcagaataagaagtggtttaccattggtgcatgaacctggagagatgatgtatttactactcctgcagagccccaagttatgttactagcaatcctgtagggcataaccacttccaactccagttctaggagatacagtgcttttagcctctgtgggcaccatcacacatttgcatttgaacatatacacatatacactaataggcacatatgattaaaaatgaactaaatcttcaaaaatgtgacttgtgtaagtgtatttatgctgccttgttttgagcctctgtgtccacccatcttccatctggtgagggaaagaattaatgaaagtataatttgaacaaacaatgtctctaaagttactggcttttcatcttctctgtactttgtctttatgaagacttgggagagaatttctgtgaaagggcttggtaagtagaacttcacccaggagctctttgttttcctaacaaagtacaactgttttgtttgcttgtttttgtgactaggttatttcacttagtttaatatccaaaaggctcatccatattataacatgtttccaaaatttttcaaaggtaccataatgtctcactgtgtgcacgcaccacaattaagctggtcatttgtatccatttgtgttgcttctataagttggctattataactaatgcaaatatgaacataagggaacaaactcttctaaaatgttttataaatctcccaacagcatcattatacttcatgtttgctccctacaaatacacacaacatcagtattttaacactgcaaaataatatgcattctctagtcaaaagcataaaacacaaagcaacagaaatgtcaacatgtcccacctcagatctcagagttccgcagacaatatccaaatttctacaaatgttctttaaatgttccagtgaaaagaactcattacttcaccatctctccacatgacagtcttttaaatatttaaagacagttatcatatttctacaaagcttctcttcccagacaacagacacacacaattctctcaaaagttcaaaattgtcattgaaaagatgtctttgacatatttcaaatctagagaacatcacaggcaacactattgcaggttctacaaaactgtcagaacagcaaatcttatgtaggggactttgcaattttataatgagatgtagccttttgaatagtccaagaaaaaatttacaatttttacttgaatttagtttaaacaatctgacatatcacagagcatgttgtgaggtattttctttcaaaaggatttatattgcatttcctgaacaggtgaactgaaatttattttcaagtaccacttgtgtattcttggaggggtatgtaaagactaggctttgtgtgttgctgtctttcatgactattgacctacaattctggagaattcagtagcgttgataacatacctaatttaaaggatcctcttgaagtggataatgtaactattagttgtatcatttagaaaaatcaaagtattattttcaaaataaaaattcaagtgtaaaaattaaagaattaatatatgtatatatttatttggagaatatctatgaatctcaggcttgccttaaactcaaaatccttcaacctcagactccttagtgttgttattataaacatatactattatatcctacttaaatacataaaatgtaatagttgtacatatatattgggtgccaggtagtggtttgaggcacagttgacaatggcagaaagctgctaaaagctagagaatgcattttataatatccccataatacaaattttacactatttgtgactgtacatatggataagctgattgagcctttatgtaatttatctatcactcaaggggctcatgaattgcctccatttcttgactatcatgttcagggctataatggacatgagatgtatatatcacttctggattgatgcattatagattagttctgtacttaatttgtgtgtgtgtgtgtgtgtgtgtgtgtgtgtgtgtgtgtgtgtgtgtgtgtgtgtgtgtgtgtgtgggggtgatagtccatactgttctctgaatcgatgcacattcccagtgtcttagtttaggcaattgttgctgtgaatacattaccaaaacaacttggggaggaaagggttaattttgtttaagcttttatattataggccatcaacaaaggaattcaggtcacgaattcaagcaggaaacgggaggcaagagttaatgcagggaccatgtaggattcctaattactagcttgattctcccagcttgctcaatgactttcatacagactctaggcctagcatcccaggagtgggaccaatcacaattagcttggtcctcttctcaattactgattaggaaaatgccctacaggtctgtctacagtctgagtttatggagacctggtaggcaccacccaaacctggtcacgtttctttgcattagggtggtactgcatgcttgctcaatggtccttgatatattgataagaaaatgaccattcactttcaattttggaataaacagctagctgcctcagggtagaccgagttatgtagcctgccacaggagccaccatcttagtagccagtactctgcaagtaagcagccattggcatagatgcaaaatcttccaccagaaggaaatcttctttgttgagattgtagataacactaaaaccttctagtgatgagaaccttctagtgatgagacttcatatacagctgcacacatttagacataatgcttttcacacagacaagatagcaatttagtagaagtttaaattcataagcacgtggacaatttcacaggacccacaggacagaggcgtaaaaccaatcccccaatattttcaagtatataaatataaaaatagtatttcagaccctacttctaaatctaatgttattactatttctatatttctatcacatctgcagctacttcctctgctgcagtttccaatcctgtaaatcatcataataggcccaaatatggaataacttttcagtacttggaaatgtagtaaacccacagagtaaacactaatcagctgagaaatagggtgatgcctgatcacaacatataagattcatgttgatgttggatttaattgcatggaatctgcatttcctaaattttatacatgtctacagatatttagaacttctgttcaccaaggtggtaagcaaatggctatgtttgcacattacacaatatgacagaacttccaacctatactaaatagtacctagagttattttactgaatctataatacttgctaatataataaaataaacatagctataagactatttacatggaaatatatgctataaatgaataaagagatattcatcataacttttcattgtgctttgaatcgaaccctacgtgcaatagtatgctttacatatattgatatctatgaggtatgatacttatatcttcaataagaccttctaaaaatcaaaatgtagggaattcaaggtagcctctccactattgcttagattcttagttggggtcatccttgttatcactggagatttctctagtgccagatttttcattaagtcaataatggttccctctattaaagtatcctttccttgctctcctctgttcttcaaccaacttgttcttctggatctctcatattctcctcctacatccacttctcctctcccccctccgtccctcccacctccctgcctccctccctccccacatgctcccaatttatcagaatatcttgtccctttccccttctccaggggaccatgtatgtctcccttagcctcttccttgtttcttaacttctggagttaagaatacctggagttgtggactgtaggctggttttcctttgctctatgtctaatatccacttatgagtgagtacataccatgtttttctttgtgtatgtgggttacctcatttaggatggtttcttctagtttcatacatttgcctgtgaatttcaagatttcatttttttttttctatttctgctgagtagaactactatgtaaatataccacattttcattactcattctttggttgaggggcatctaggttgcttataggttctggtattacaaataatgctgctgtgaacatcattgaacagatgtccttgttgtaggaatgtgcttctttggggtatatgcctaagagtggaattgctggatcttgtggtagactgattctcattttcctgaggaaccgccatactgatttccaaagtggctctaagtctttgcactcctaccagcagtggaggagtgttcccatttctccacatcttctccagcataaactggcattggtgtttttgattttagccattctgacatgtataagatggtatctcaggattgtcttgatttgcatttccctgatggctaaggatgttgagcaatttcttaagtgcctttcagctattagggattcctctatcgagaattctctatttagagatctaaattctatattcagagatctgtacccctaaaatacccttcttctataatgagattgaagaccaccttaaatgccatcatagagccttcatcaagtagctgacagaagcagaagcagagattcagagctaagcttgagccagacacatggagtccacttgtagagagggaggagtgatcagaagatgggtcatgactatgctggggaaaccgacaaaaacagctgatctgagcaagaggaagttcaaggaccccattctgtcagctggggaaccaccataggactgaaccaggcctcctgaacatgggtgtcagttgggaagcctgggtctgtggcagtggaaccagtatttttccctgatgtaagaatgggtttggggagcccattccctttggagtgatatactcttggcatagatacctggggaagggcctaggtttccgccccaaatgatgtgacagactttgatggaggtctcaccctccctgaggagtgggtgttggggtgggatggggaactggtggtggtaatgggaaaatgggaaggagagggaactgggattggtatgtaaaataaaattatttcaaatttaaataaaaattaaaaaataaaaaacccaaaatgtagcatttttattttaagaaagtccattatctttactagagaaagaaaagatggatctcaatcataaatgttcttacaagattcagcagattgtaactggacattgtgcacatatatttaaagtatgactcacctcacaattttaacctcattactaaaagtaaagatctcaaactaaagatagaaagtcattgattgttttattttcactatgatttttattcttgtcaaaaaagaaagcattaccaaaccttatcatgttactaagccaggaaatgtaaggcaagatacttaataaacatttgtgttagcacaatttaagatggaagttcagtggaaactcaagaggacattattctatttaaaacgtttgatttctcaagtatttctctcaatgagattaggaaatacatattttttaattcaatgtctggttttaatacacattttaacaccatcaagaatgaagttactttgtattcaggagaaacagtcaaaaatggagatcatatcattaaggcagttaacctagtttcagaaatacaaatagtatgttctttctcatctgagctttctagattttatatagatacataaagtaatatatttatatatggcaagaaattgtaagtgaaattgttcagggtacaaaggtgacaaactaggaaacagggagagacacagggtgtggggatggaagtatataaatacatacactcgtagggaaattttcaaaacaataagaaaatagtggcacacatatcatatcttaatatcaaaatatcttttatttgacttgagtgtgatgtgtagacaccttatagcatttattcatctggttttggtattttcagagaagcaaatgtcatcacactgaactaatgagtaagtatgaaatttatctttccagagttactgttctagtaaaggttccagttacttcaactgagttcatacaagagcctcatgtccctacctttcttctataattgcctcatttcaactatgtaccctcgatggaggagctaaattgtgtttgtgtgtgtgtgtgtgtgtgtgtgtgagtgtgtgtgtgtgtgtgtgtgtgtgtgtgtgtgtgtgtgtgtgtatgagcacacacatgcctagtgtatcacattacttttatgagaaattgatttttcacttagtcctcgaatgatatgtaaataaccctcaagtaaaatatgataaattattttatattttcctaggaaaataatgtgtattttaattttctttctcctcctcttctccttttctatttttatttgcaaatttcatcaatatcttatccttcattcatctctgtgcagtcttccttctcctgccttagccttggactagctaggcttggaatggcaaacctatacattttattattaacttttctgtcatacttgtactctctgctttttcttagtagttttgcacatgctcagaacattatttctatgtcctagcagtcctgcttaagcaacaatcagtaatgtatgacacagtattattgagttctctgtgtgttctaacagccaccaatacactgcatcccttgttctgtagactttatttcattgtcagtatttcatcatccaggatagtccttcttcctcatttctagggaatgaccatgagtttatatatttttatagacaatgattagcattttccacttgtaaatatcttatgtgggcagcaaaaaatcctgtagaaatttattttgtgttttattagaaccaatctctataatttcccatagaggcaaatccagtgagttattttgtagagaaaatgtacactatatatagcttgaagtgtttcaggaaaacaggaaatcataagcctaagaacttaatttgttcttttacaatctctacatgagaataaccttctaatctttaatcaaagcaagaagtgattaaaacaatcatagcttaatgaagccccagtcctttcataagaaacattttgaaattctaacacaccacataagccaatttataagttgcagacaaaattatactcagaggaaaatttggtattgtaataaatacatggatttaatattatattatcacaaacaactcaagcaaaatcaggtacacaatttgcaggagttattgataacaaaaatgtgtaagtacagtggactgaaaaatgaatttagacaagtctggccaaattttcctctgactataattttgcctgcacttataaaggtatcattggacccactagactagaattacagttctttctgagctgggtgctgggaaccgagcccaggtcctctgttggagcagcaggtgctcttgactgttgagccatctctccaggcccctcctcaatgatatcttgtgaatgaagtccaggacttagatgaagcaaataattcctctgaactaaattgactgctattatatgtcacctgtgcaaaatcagcttcaagaaagtgatgccctaatactgtactgagtgttcattatttttaatgtttcacactcagatttccctgtaaccattgtcacctgaggcaggagaataatagttcctggaattgttatttggaactttaattgtcggatttcaaaaggcatatcataatgcctttaacattgatttgacccatgtgtgataaatgcaatttatgttgattaaaatggtcaaagttttttaattaaagtacaattaaattgtttttccttttcccttatctccttctatgccctaactccttccatgcctttttttgttccatcttaaattcatgccatctttttctttaattgttgctgctacatctgtatgtataaatgaataaatatacaaacacaactggctcagtccatttagtgtaacttaaatttataagaattcaggcctggcactggaaacttaccaaacttctcaagtcaagtgaggtaatggatcttagagaattatcatctaccatcacaaaacaatgtaattcttaatcacattctaaatagttatccttcaaccagcaggtaagtttagctacactcctcattaaagaaattgttccatgtgacagaccaatactgaatgccacacgctggtcaaatgcagaaaaaaaatcttgtgactacatttacaatgcaactcatgcaactaaagctcaaggagcattgaagaagaggaacagaattgttatacgagccagaggttgtgtctcccagaaatggccatgattcattaataatatggctgtgtaaacaagacctgaacaagcacaacactaatagatgtgctaacaaggaaggcagacatctcacatggttccatccataaaggaggatctgatgacttcaattttaaaaagaaactaaaattttcatttgattctgttttcaaatgtccccttttcccttttcccttttttcatttctttcattacacatattccagatctatactatttgatatcattttaacacattttcatttatttcttatggacttaatttattcagatattatttatgctgatatcacttcctttctggcactttaaaaattactagtaattttagattgtggccttttcattgactgaagactggttagtagtcatggaaactctgcagagcttatgttgaggatgccttcatctgagaagggcctgcaatctcaaataatttttgctttatttggtagcatatttcttagactatagagacaataaaaatgtcacaggcactcaaaatcatcaaggatgctcaatgagcataacaatctcagtgcataacaattttctctttagtctcagctaccagatattcctctattttgttgtccctgaacagcctttctttccctcttaattctttcaccaaatggactttagagttatctctgttttctgggggctgtgttctggctccattgatcaatactgactgttgccttggcaggatctaaacttgtgcaacagagaaacctctggccatgtctgtaaaagattatctgggtgaactgaccttgggtctttatcaaaaagaaaaagtgaactgagtgccagcattcatctctccttcccacctggggaaataatgtgagccacttcctcaagcctctgccactctgccactgtactttttccaaaatgagctctgctttcagtctgtgagcccaaactagcttttagttcttttgtcaggcattttgtcatagcaccaaggacagtaactaacatatgatctatgtgacttgcaaatgtcctttctccacaatcctctgagtaactgttttgctattaaaattatttaatttagatgtaatgagtttctgtttttctcccaaccttctcactgttgatgaattatttcctatatgtgaatttttttagaatttaatcaattttgttttctgggggtccaatttttcctattcatgtaaatcccatgaggatacaaaacccttattttcttgctcattgtaatgtagccattgttgagtctgggagcataaaagagagtctgaaaatatgttatgtgaatagatggttgaaatcattcgtaaactcagcctattttcaaatcaacagatttcttttataattaaagaaagctatattagattaaaaaataacccgatttgctatttttgccctctctaaggagattgtttaaaaacagacgtgttatgctttgttgcctagaaacctgtgagacagatatttaagccatcaaaccccactctggaatctgctgaaaacattgagccacctgtaatcactgacaatgcacatggtgcatgtgttccttgtaattgcgcacaggcaccataacaaagcagagaggtattgttgtaagattgaaggaatagcactgaaaattctcaactgcatcatcataaataagctcgggattttaggagagtagatgatagcatgaacttattcaattattaagatatcttctaaagtttgctgaagtttaaaaatctcacaagacagaatgatttaatggaaaccacatcagctcaatgcagttcaaagctgccccaacaaacgagttaagccaatttgcaaatgtcaaacatgtccctttaaattggttcattaactcacttttggaaagctgtgtcaagaaccaggagttactggcattgctcattagcagattacctggacagggtaaataagtttagatgaaatcagattgagtagactaccttaaaattcagtgcagcctagcttttccaactgctctttctctggtgggttattgaaccatttccaaccatgcagattttaacaagtatcagggaatatctctgccaatgtgcacaccgaggctccctagcagagacacaggcattttgttacagtttttactaatgattttattgacaacaggaaaaccatgaacaaaaattcaaagagcacactgaaatgattggttgtaaaaattaaatataacaaagatagaatagcactgagagaaaatataaagtaacacaatcacaatttgttgcctatcagaatgtccaagatgacataatttgagatgcataattttagcatgaggcttcttcccagaatctctcattttcatttaatattccatccaaagctctctttttttctgttgttccttttatttgaaagggataaaactcatatttaaatgagatgcaatcatagaagagaagtctattatattaggacttgttaccaccaagaacattctagaactagtatcgttgaaacatacagcaaaatttaagatacagaatttggatttttatatgctaaagtaaataaatattttctgcagactgcagcatggcattgtaatacttaatgaatgtaggtatcttatgtttcctaacttttggtgcagtacttcctagtgatgacctgatggctgaggtctcttgccctctttcctcatctggtaaagtgggcacaaaaatacttgtaatgtgagccaagcacatgaaacatacccaagtgttgggcatctatctaataatgtagctcttctgtcatcagcacacacatctatattctatcagatatttgtcctcaagaacatgatagcttaggatagtttactgttagaatgccctcagtttccataattgtcttactgtttagaaagcattttatactgggaaaaagagatttggacataggaagaaaatctgaatattgtgttcatttgtcttaggatgatagagaaagcctgatacagagataccttcaaagtacacactacttccaattgtgctcctaacccttccaaatttcttcatggcatgggcaatgatcagttctcatttggctatgagaaacactgttagggtgtggaaggaaaatgccactgtcaacttgattactaggaaaacctcaaatattttatggcaacatagaataaaatacagcatatattaatgaaaatacctattatatttcagtaatattcagttatacttatatagtatataccctgtatttacatatatctgttaagttatgtaactgtatatattacatggacaatacatactcacatgagtatccataatcaaaagtctttcatgcagcatttcctactacttcagtttgtatacttctacatactaaaattacataaactttctcagacattccttaaataatatatatttaatattttatatatttctcgttcttattctgaaaagcaaataatgttattgtttccactccccagatacaaaatgtaatttttctatgaccacaaggcagagaagttatgttgttcaagctgacaattccagcacttgagaggctgaaacaggaggattttgccagcttgaagcctttctgggctacagtcgattccatgtgagtcttacagtgagacctttccccaaaacattaaagcaaccaaatagactaaaaggaaagagagaagcctagagagatagcgtttcaatggttaagggtgaccactggacagtcaagaagccaagcagcaagcatccacagagccagttagacatcccatgcacactactaagcccagataaattaattcttctatcccatggatttgaacatacacgactgagattaaagaatgaattcccagagatgcttcctcacctttaagcaaacatgggcaccaacaatgccacttcctccctcccacttccaggactcctggtattaccagtggagctctacacatttgctttagcacaaaactagagctgcaatatcaaggactgtccttgggcacagttcctgtcattgggaaggtctatttaagacaatctgagcactttctttggtgttgttttggaaatataacacagacacatcacttattgcaaatatcttaatttactttgaatatgatattgtagatagggtctttttaaaaatgttgcttgataacatcttccactggataacgggtatcattactgacacagagtcagggggtgacatttctatagctctgaatacaatttttactgattcatatgaaaaatactagggatatttaacagcaaaagaattggttattttctgaagtcacattttaattggcctagtcatgttcttatgctttttaaataataaataagactgaaaatgcctttaatacaaggtacatgatataatttatttctgagattataaatagaggttcagagttttctatctattggagtggcattaacaagaacgaaaagtaataattgaaattatgtatggttttttgagctataatttagtagacaccatattgatcctgtaaattaccacactacagagtctgtctgaacatttaagacatgttatagaaccagcctgccccacagctttgagacattaagataaactcacagtgatcagtccctttttcactatgaagcaatgaactgactgtaaaattcttacagtagctgtgagaactaaagatgaatttagcattgcctggaacctaggaaggaacatatcataatagttttagaatatgaccaaggagtatttttgagtgtggactattctctgtcaatctgtttctaataggcttcatattttttttttcatttaagtctagggaaggtgactgctaagtcatgaggttactcaacagacctaagtagagacctgtgcaataacaaatgtctatgacagaagctagctagatcttgcatctactatgactattatgtgggtgaaggatccagtgggaaactttcaactctaagcaggcctctgtgtcactgcagacttagatggctccttgagcagaaggatcctccctagcattacccattgccttagttggggtttctattgctgtgaagacaccatgactgtggtaactgctataaatgaaatcatttaattgggctggattacagtttcagagatttaatccattatcatcatggtggacacatgacaacatgcaggaagacatggtgctagagaaggagttgatagttttacatcttaatccataggcaataggaagtgaactgtgtaactgggcatagcttaagcataagagacatcaaacttatccctaaggtgacacatttcctccaacaaggccatacttactccaataagctacacagggtaaatacacttgccccatcaagctgggggaccaacctcagagcccacatggtaggagaaaaaaactgatttatgtgtatttaactttgaactctgtgaactgtagtacaacatataacaaatgaataatgtaataaaaaattaaaaaaggaagcccactgtgcaatagcctgttgcacagatattttaacactattgagacatgcaggacctatcacaatggtattctcagtatgtttcagattttatgtgaaacaaatattcatatgaatttgtaactcctatcaccacagtattaggaacaacaggaaaatatttctgcatcaatttatcatgttactgactttggaacttataaaaatgtttttcacagaaataaagctctgtgttctcagaatgaaatgaatattgataatattggagaaagatcatacatagaaatatctgcactcctaggcaaatgtcaagagatctacaaggttgtgttattcttttgtttaaaaagaagaaaagagaaatgctgagacacgagacatgttgaccataagtttattatgaggcctggcagagtagggacactaagaagaggaaaggaacagggtaaatggctgaccgccatggacggttgccatagacagaccgagagagagcataggtgggagacagagtagagagaaagcagggagaggaagcagagcagaaacagagagcataaatggtcagggacctgtcttttaaaggagtcctctgcaccctcgtgcagacttagttcccatggaaccttgggctgaccagggtactgcctgttccaccaggtaacaggggcaggccagcataatgcctgaacctttcaggttgacttcaactaacaatctaagcaatagtcaagaggctaccttaaatgcccttcccctacaatgagatagatgactaccctataggacatcctagagccttcatccaatagctgatggaagcagaagcagacatccacagctaaacactcagctgaactctggaatccagttgcagagagggaggagtgatgagcaaagggatcaagaccaggctggagaaaattatagaaacagctgacctgaacaagggggagcccatggacactagacagatagctgggaaaccatcataggactgttccagatcccctgaacaagaatgtcagtttggaggtttgattaatctatggggcctccggtagtggatcagtatttattatccctagtacacgaatggactttgggagcgtgttgtgacccggcatgtctcagctctaagccacaactgccatgaggttccacctgagtggtggtgcatgtacctggaaactcctagcaacatagcagctataaagaccaaacacaggcatcttgtcatctttagcgagctctcagtttcatgttgtaaaactagagtcttttgtttatttgccatcttttctgctgtttctgaatggtcctgccatgaccaggagggaaccatatctctccttgttctcctctctcctctggttgcttgcccctcactcctgtcctccctagttacttacaccccttggacctctgcccaggggcagacctattcagatgtttaggcacaatagagatgcaaactaggaggtgtattccccttaggccttggtaaacaatagtagccctacaggcaattaacaatacaatggtgagccagagttttctggtgctccatgtttactgaaacagaaggctcgcccccaaaatatttcataaacagaattatttggtcccccacaggagcccactccacatagagggatactctctcagcctagacacatggggagggtctaggccctactacaaatgataaggcagacattgaagatcctccatggcctcaccctccctggggagcagaaagaggatggaatagtgaagggacctgctcccctttcggcggccataacagcccaaacacgtgcttgccataaacctgccttggtcacttagaggtcagatgcctgtctcgtgacaaggaaccaatcagaagttagctggtggcgctatgctttannnnnnnnnnnnnnnnnnnnnnnnnnnnnnnnnnnnnnnnnnnnnnnnnnnnnnnnnnnnnnnnnnnnnnnnnnnnnnnnnnnnnnnnnnnnnnnnnnnnnnnnnnnnnnnnnnnnnnnnnnnnnnnnnnnnnnnnnnnnnnnnnnnnnnnnnnnnnnnnnnnnnnnnnnnnnnnnnnnnnnnnnnnnnnnnnnnnnnnnnnnnnnnnnnnnnnnnnnnnnnnnnnnnnnnnnnnnnatgtcctataagatctcttgggaggccctcggagccatcttttgctagccatccgccatggcgggtgggtgaaagacctgagctaacatggggttagctcgttaaattacaataaagcctcatgcagtttgcatcaagctctcgaatccgcctggtgattggggtgaccgcgaatgtggcctgggaccccggatacctgagttttccgggggtctaacatttgggggctcatccgtgatttgcgaccacccctcatctgagtggattcgatcttggaggtaagatgattcgagcttgtaacttatatgttcaatgttatgttcaatgttctgtatgtctcttgctgttctgttggtttggtgccatgacttgaatttgatctgtacctatgcaggacttgtacttgtatttacttgtatttgatatttgtataattcggacctcagggggaaatagacttatttcgagaccctgaagtcccaccctggacgaaagtccgagggttatttgaattgaaccatagggtaagcagacatgcaggcccagaaatagacgtatttctggaactcttggttccgccctggacaaaagtccaagggttgtttgtaattttggtttggggcaccatttctttaccgaggtttgtgctgtctaatgtctgtccacgtttcatatttgtgttgtgtgtttgttaagcatctctttctgtccctactgcccatgcacatggcatgcatgggtcaggggtcttttcttgatgctctgagcatgtggcaccacctcaactgtgatcggcagatgtgcccggaggacagactgctgcaccgaagacacccaggaggtatgaacggaggccaaggacttggatcctcctcagttatcggtgattgtaaccacagggttctgccgcccgtcttcccggtgccattgccttataagtggcaccagtggatttggttggcgtctgctctttcctgtctattttgtattatcatcattggttttcaattcaggatccaccatgccaccccctttctatccccaccttcaggtctgtgaggcatgccaagtggggctgtttctgccccagctgccgtcctgccatgggtcctggcttgccttgggagtttccctgctctgagggaacatggctgcaaggccgccatctgcctggctgcccggccttttctgtgctccacactcatggtatgcaggggggctgcaggggtctttttcccacctctgcattggccgagggtctggggttaccagcagcacccctaccccaggtctctctgccttgagcacatggagctcgagcgtatgaacttatcaggcctgatccagacttcttaaaaaaaaaataggccttaaagttattaaaaactgtaaaagggactttgataaaaatttttatgttgactgagaaatgaggaaaaatgtaggagacttaagtaataaagagtgaaaggaaaaaaggaaatttgtctaagaatgtctaagaaagtcagagaaataaactaaaagtatataaaaaaggttatagagagataaagcaagttgtcaaaggtcagaaaaaagactgttcaaaagagaaaaaaaaaatgtaaactgtgctatggtttctcatgtctacaagtagtaaattttaaatatgtacatgttaacaactgtcctttaagaagttcagggtcaaatatgaagcataaacaaattgttcaactctattgtgagtctgctgtttttcaaacaaatatgtcattattcttaccttcaataaaagaagtaaaagaagccatatcaatattttaggattacatatcttacattgttactccaattgatagatcagcataaatataaatgtaggaggtaatcattaattattcaggtaaaaaacaaagaaaacagaaatgggcttaagtaggggcacttagcaagtttctaacaaagtgggagagagaaataaaaagcccaggtactctctggcagccagcatcttggggttttagcacttggacggataattaactctgacaggttaaattaacatgaacataaaacagaggaaatctatctttgtgagtctctctgccaggaaacacaagcctgtaattgctgtgatacagctcttcagcatgaagccagtccactgcttatgtcattgattgatttgatagttcaagagtctactccagtcctatgtgcctggggattactcttttcacaactgtagattctcttgaactctgtgcgtgtagatataaataaatgccactctgaatctacacatatgctcttattaatttctttattttatttcatttggcatttggggatagcaaggggcttgtcagaactcagtgccctacaggctggcctctcttctattaggtagtctggggagatgtcagagatcccatcttaagcagaatgatccacaccaccatgccttatcatcacaagactcaccaaaatcaatcctaccttctttaacttgcttcttgtcaaatgtttgcttggaaagacagtagaagtccattccactaagaatgtgatatggattagcccctttaatcccatacgaacttttacttgaaaaaaattgcagttcagagacattaagtacattacataaaaccaaaccgctaaaggaaaagaaaaaaaggataaagaaaattttatctggagacttgtgagaaataggtctaatttgtgaacttccatgctcttgtttaaacttgcactcatgtaacactggactctcagccctgtttgtgtatgtgtgtatgtctgtatgtgtgtatacacctgatagaggaaatcaaagctcttcctgaaaacccagagttcacagacaaaactgtatcctgaatccatgaattcttttgaaagttaaataaatgaatccatgagaaatgctaatccctttataatgtttcctactgacttaatgggctgcaatggtgggtttggtgccctttcatcgaaaagaagatgaagcccttttaaaggtttaattgttggggttagaagctgatttgcttttatctgatcaatattactctgaccaagtatcaattaagctaagaaggctcctgctattgaataaaggaagggctttaattaaatcctattctctagctttcataatgacacagagaatcagtttttgctgtatttttgaactaactgtgaataggcagtaacttaggactgaaaatccaagacttcagacagattggcatttacataagagggacacactgtaaagtggactgtgcttcttcttgttcactatatatattctaagactgcttcaacatttatatcttcaagcacattcacccttaaacagcttcatcttcatttttttcatgttactctatggcactggctctcaaccttcctaatgtggtgaccctttaatacagtggcttatactgtggtgatgcccccaacattagattattttcattaatatttgatcattgtgattttggtaatgttataattcataatgtaaacatttttggagatagaggtttgctaaatgtgtcttaatccacaagtttctgttttctagttcctaggatttgtactttccacctttttttcctttcatatctcatgtagattagaacataaaacacaacactttaaaatatgtcctttgttcatcacagccctgcactggataattgcagatgccctagaaataccaaagggatcttattttgctatgttcaggttgcctacactccaatgtgtctctgatgagatgggtttatcccatcatctttgctagttcatccagatagccacatctcaacattaactggtgtatataattgcatttgccctccaattgtttcattgtatgggatatattcatgactctcgcttttgttgtatgtttgtataacaaagcatattatgtagacacagacattgactgcacagagaggaccaagaggtgagtgaccagcctcccatctagaccaaacagcctataggtcatagaccccaagacaaaaccctaggctctcccccaatgcatctcagccacactaaactaacccgtcagtgggaaaagctcctaaagacaagctacaccagcaagtccccctcaagaatatgcaatctacaagtcctattcctcctcccaaattcacacaccaccagagaactcagaggctccctgaggcacagacagggactgcactgagctgacctagagcagctccctgagacacaggcagctaccatactgatcagtccaagagaggctctctgaaacacagacactgactgaatggatcagaccaggagacaaagacattgtgtgcaccaactggaggaaaagatggacagatgtcaatgcaagattacattcaacaactgaaagagcaatagggcaccactagaacccagaggtcctacaacaggaagacctgaagaacccaacgaagaagaaaacaaatttaaaaataactttatgaagattatagaaatccttaaggaggaaatacaaaattccctgaaagaaatagaggaaaaggcaaacaaaaatggagaaaatcactggtctcttaaagaaagccaagaaaacaacaacaaaatcaaacaagtaaaggaaacagttcaagacttgaaaattgaaagagtgacaataaagaaaacacaaaccaagggatttctggacatggaactacagatgcaagcataacccacagaatgcaagagattgaagagagactctcagacattgaagatatgatagaggaaatagattctagatagaggaaataggtgaaagaaaacattaaagccaacaaagtcataacacaaaacatccaggaaatctgggcaccatgaaaagaccaaacctaagaataatagtgatagaagaaaatgtagaataccaactcaaaggcacagaaaatatattaaataaattcatagaagaaaacaatcccaatctaaataaggaaatgctaatgaagatggaacaagtttatagaacaccaaatagactggacccttgctacataataatcaaaacacaaaatatacaaaatagaggaagaatattacaagctgtaaagaaaaaagtccaagtaacatgtaaaggaagaaccaacagaatagcagcggacttctcaatggaaactatgaaagtcagaaggtcctggatagatgttatgtagagactaagagaccatggattccaatgcagagtactttcccagaaaaattttcagtcaccatacatggagaaaacaagatattccatggcaaaaccagatttatagaatacctattcacaaatccagccttacagaaagccctagaaagaaggaaagctccaaacccaggatgttagctgtatgcacaaaagcacaggtaatagatgattccatgccagcaaaccttaaaaaaggaaaacacactcaccaccacaaaaaataacaaaaatcaccaataactgttcattattatctgttaaagtcaatgaactcaaaaatcccctataagaagacacaagctaaccagaatgaataggaaaacagtatccattcctctgcttcatacaagaaacccacttcaacttcaaagacagatattacctcagagtaaaggggtgggaatttttttccaatcaaatggatctgagaagcaatctggtgtagctatccaactattgaacaaaataggccaaactaaaggtaatcaagagataatgaaggacatttcatgctcatcacaggaaaattccaccaatatgatgtatctattgtgaacatatatgactcaaatacatggtcatacacatttttaaaagaaacatttctgaagcttatattgcacatcaaaccttcacactaatagttggagacttcaacaccacactctcactaatggacaggtctaccagacagaaaattaacagagaaataagggatcgcacagatgttatgactcaaatgggcttaacagacatctatagaatattccatgcaaacacaaaagagtattctttcttctcagcacctcatgaaactttttctaaaatttaccacatacttgattacaaagcaagtcccaacacataccaaaaaattggaataataacctgtacattatcagattactttgcttaaagttagacttcaacaacgacacaaattgtagaaagcttgcaaactaattgataccaattaatgctcaactgaatcactcctgggtcaaagaagaaataaagaaagaaattaaggactttctagaattcaatgaaatttaatgcacaacatacccaaatgtatggaactctatgaaagcagcactaagagggaagttcatagcactaaatgcatacttaaagaagttggagaaatcccatattaacaaattaacagaatacatgagctctagaacaaatagtaaaaaaactcaagcaggagaagtagaaaacaggaaatgatcaaattgagagctaaaataagaaacacaaataaacagaacaatatagagaatcaatgaaaaaaagagttggttcttagagaaaaataaaaagatagacacaccattatccaaactaaccaaagggcagagagaatatgcaaattaacaaaatcagtaatgaaaagaggaacataacaaaaaatactctggatactcagagactcattagatcatacttcaaaaacctttactccataaaatcggaaaatttaaaagaaatggacaattttctggataggttccacatggtacaattaatcaagaccagatagacaatttaaatagacagatagccgctaaggaaatagaagcagttattaaaattctcccaaccaagaaaagcccaggatcagaaggtgtaggcacagaattctatcagaatttcaaagaagagctaactccaatactcctcaaattgttccatacaatagaaacagaaggttccttgccaaactcctttaatgaggctacagtaaccctgatacccaagtcacacaaccatgcaactaagaaagagaactacagaacaatcttcctcatgaacattgatgaaaaattactcaataaaatactgactaaacaaatccaagaacagacaaaaaaaaaaaaaaaccatcatatccaagtaagcctcatctatcgtataaacaaactgaaagaaaaaataacacattatgatgcctccagaaattcttttattgaatagggttgttttggctatcatgggtcttttgtttttccatattaagttgacaattggtttttcaagatctgtgaagaactgtgctggaattttgatggggattgcattgaatctgtagattgattgcttttggcaagattgccagttttactatgttgatcctacctatccaagaacaggggagatccttccattttctggtatcttctttaatttttttctctaaagactcaaaattcttatgatacaggtctttcccttttttggttagcttaacctcagggtattttatgttgtttgtggcaattgtaatgggtgatgtttctctgatttctttctcagcacatttatcatccatatatattagggctactgattttttgagttaatcttgtattctgccaatttgttgaaggtgtttatcagctaaaggaattatatcatctgcaaacagtgaaagcttgacttcttcctttccaatttgtatccccttgatctacttttgctgtcttattgctctaactagaacttcaggacaatattgaagagatatggagagaagggacagccttgtcttgttcctgatttcagaggaatagctttgagtttctctccatttagtttgatgttagctgctggcttactgtatattgtttttattatgttcaggtatgttcctgttatccctgatcactccaggtcttgtatcatgaagggatgttggatttttcctgatttcaagctctattatagagccatagtgctgaaaacagtttggtattggcacaaaaacacacaggtagaacaatggaattgaattgaaaaccctgatattaaccagcacacctatgaacgcctgaattttgacaaagaagccaaagctatacaatagaatgaagaaagcatctttgacaaatggtgctggcataattggatgctggcatgtagtagactgcagatagatccatgtctatcaccgtgaacaaaacttaagtccaaatggatcaaagacctcaacataaatccagccacactgaacttattagaagaaaaactaggaaataccctcgaatgaattggtacagaagagcatgtcctaaacataacaccagtagcacagacactgagatccacaattaataaatgggacctcctgaaactgagaaatttctgtaaggaaaaggacacagtcaacaagacaaaacaacagcacacagattgggaaaggatgttcaccaaccccacatctgacagagggctgatctacaaaatttacaaagaactcaagaagctagtctccaaaataccaaataatccaattaaaaagtagggtacagaactaaatagacaattctcaatagaggatctaaaatggctgaaagacacataagaaagtgctcaacatccttagccatcagggaaatgcaaatcaaaacaagtctgagataccatcttcctcctgtcagaatggctaaaatcaaaaaacaccaatgacagattatgctgtagaggatgtggagaaaggagaacactcctccactgctggtgggaatgacaacttgtacagcccctttggaaatcagtatggtgactccccaagaaaatgggaatcagagaaagtgggaatcagtctaccacaagatacagcaattacactcttaggcatatacccaaagaagcacatctgttcaactatgttcataacagcattatttgtaataaccagaacctggaaacaacctagatgcccctcaactgaataatggatagagaaaatgtggtgcatttacacaatagaatactactcagtggggaaaaaaaaagcaatggaatattgaaattcgaaggcaaatggatggaattagaagaaatcattttgagcgaggtaaaccagtcacaaaaagacaggcattgtatgtactcactcatatgtgcattttagacttagagtaaagtattgccagcctgcagcccaggctcctggagaggctggtaaacaaggaggaggctaagggagacataacatggccccctggagaagaggaaagggacaagatctcctgagcaaattgggagcatggggggaggggagcgggaactaggagaatgagaaggggggaagaggaggggggaggaagacatgatgggacaaggagtttgagttgggggaagaacagaagagagcaagataagagataatataagatagggagacatcataatttcaaagaaaaatcaggcactagggaaatgtctggagttatcaaagatgacaccaactaacaatctaaacaacagaggagaagctcccttaaataccctctcctgataatgagattgatgactaattcatatggcattgtacagccttcattcagcagctggtgtaagtaaaagcagacacccacagctaaaccttgaactgaactgatctagatgcagagaaggaggactgatgagcaaaggggcccatgccatagtggtataacccacagaaatagctgacctgaacatgggagaactctgggtccccagactgataggtgggaaaccagcatgggactgatccagaccccctgagtgtgggtgtcagtgaggagaccttggaaatccatggaaactcctgtagtagatcagtatttatccctagcataggtatggactttgggaacccattgcacatagagggatactccctgagccaagacacacagaggagggcctaggccctatgcaaagaatatgacagactctgaagaccccctatggaagaccttgcccctccctagggtagggatgggtagggttttaatgggggatggtggcaggtgatgaagggaaggagagggaactgggtgtgacatgtaatacaaccttgtttctaactaattcaaatttttaaaaaatggaaaagaatgtcatcttgcaaggatgctatatgttacaacttaaaaataaaaacaacttactttgaaactaactttaactaaatatatcaatgggatagttgttacagcaatcatagtgggtgttagaatatatacatttaaaaaccttttaaaaattaaattggaatgtacaattcttttaaaaagtctatacctacagaatgtataattttaaaagtataaatgaattttgagatagcatgtttaaggtgtagcatcaattcaaaactggtttcctaatattttaataaatattaagttatttagtgtagccctttctatacaatatagattggcaaacagaacatctaggtacttaatttcaaagcccacaactataaagagaaattactatgcttatatgagactttaattttttaaaactgcatgtaacaagtaccaaagactgtgcaaaatgtgtacggcatgagtaaccaacatactgctttctgttgtgnnnnnnnnnnnnnnnnnnnnnnnnnnnnnnnnnnnnnnnnctatgccaatttattgtaaaaattgagtaagtggctccataaatgtaaatgttttgttaaaatattataattgtctcaggctattataattgattttaaagatgaaaaaactaagaaattaaagacaaaaagaataagaggtagacagttctctgttagctcaagcccagactgactaaacgaaattgatccagttttaaaagaaacagctcacacaaaggtgatctcagcacctgggatcacaggtctttaatttaccatgctgcataaccctcttatatacaaatgataaactggttgagaaagaaatcacagaaatgttaccctttacaatagccacaaatataaaataacttggggtaactcctgcatgacaagaactttacgtgcctaaagaaagaaattggaaaagatatcagaaaatggaaagatatcccattctcttggattggtagagtaacataataaaaatggcaatcttgcaaaaagcattctacagattcaatgcaattcccatcaaaatcccaatataatacttacagaccttcaaagaacaatattcaacttaatattaaaaaaaacttactccttttagaatggctaaaatcaaaaacaccaatgataatttatgctggagaggatgtagagaaaggggaacactcctcgactgctggtgggagtgccaacttgtacagccactttggaaatcagtatggtgactcctcaggaaaatgggaatcagtctaccacaagatccagcaatcccactcttaggcatataccaaatagaagcacattcatacaacaaggacatatattcaatgatgttcatagcagcactatttgtaatagccagatactggaagcaacctagatgcccctcaactgaagaatggattgagaagatgtggtacatttacacaatggagtactactcagcagagaaaaacccaatggaatcttgaaaattgcaggaaaatggatggaacaaaagaaaccattctgagtgaggtaacccaatcacaaaaagacaaatgtggtatgtactcactcatatgtggattttagacatagtgcaaaggattaccagcctacaatctacactgccagaaaagctagtaaacaaggagggccctaagagagatatacatggtcccctggagaaagagaaagggacaagatcacctgagcaaatcaggagcaaggtaggaggggggagggaggtggaaaatgaccaggggataagaggaagggtgaggaggacatgagggagtagaaaggttgagtcaggggaagaatagaagaaaacaagaaaggaaaaaccataatagagggatacattttaggtctacagaaaaatcaggcactaggtaaaggtctggagttatatgaggatgacaccatctaacaatctaagcaatagaggagaggctaccttaaatgtcctcccctgataatgagactgatgactgtcctatatgccatcctttagccttcatccagcagcttgtggaagtagaatcagacactcacagttaatcactgaactgaactggaatccaattgcagaaaagaacaattgatgaacaaagtagtccagacaaggctggtgaaacccacagaaacagctgacctgaacaagtgggagctcttggtccccaggctgattgatagctgggatacaagcatgggactgattcacatcccaggaatgtgggtctcaatgaagagatctcggaaatctatgggatctcctgtattagttcattacttatctctagcataggtgtggactttggggtccaatccacacagagggatactccctgagccaagacacatgagggtgggcctagtccctatcccaaaggatatgatagactctgatgacccccctatggaaggcctcaccctccctgtggagcagaaaggacatgtgataggtagggttttagttcaggaggggtggtagaggaggatgagagggagtgggaactaagaggaacatgtaaaacaatcttgtttctaattcaaataaaaaaagatggaaaaaaaacagaatagctaaaacaatcctgtacaataaaggaacataaggcagcatcattatccttgatgtcaaactctactatggagatataggaataaaaacaccttcgatgattggcaattgaataaagaccctgacattaatgcacacacttgcctggcgttggtggcacacacatttaatcccagcacttgggaggcagaggcagtctgatctctatgagtttgaggccagcctggtctacagagcaagtggcaggataggctccagagctacacagagaaactctgtctcgaaaaaccaaaaaaaaaaaaaaaacagaacaaaaaaatccacacacttgtgaaacctgatttttttttttttacaaagaagccaaattgtacaatggaaaaaggaaagtgtcatcaataaatggtgctggcagaactggatgtcaacatgccgaagatgccacaaactgatgttcaagtggacaatgacttaaaaaataaatacagctgtattgaaactgatagaagagaaagtgggaagtagccttgaacacattagcacaggataccacttcctgaacataacaccagtagcactggcactgagagcaacaacaaatgcaggagacctcctgacactgaaaagcttctgtaaggcaaaggatgctgtcaataggacaaaatatcagcctacaaaatgggaaaagatcttcaccaaccctacatctgacagagggctgatctccaaagtatatagagaactcaagaaactagacatcaaaatacaaaataatccaattgaaaattgggtacagtgctaaccagagaattctcaccagaagaatctcaaatgacacaaaggatatttaaggaatttctcagtatccttaatcatcagggaaatacaaatcaaagcaactgtgagataccatcttatgccttccagaatggctaagatcaaaaatactaaggacagctaatgctgtagaggatgctggtgggactgcaaacttgtacagccagtttggaaatcagtatgaaggtttctcagaaaattgtgaatcaatctttctcaagaccctgaaataccactcttgggtatatacccaaaggatgctgattcttaccactaggaaacttgctccacaatgttcatagcagcattatttgtaatagccagaaccttgataaaacctagaggaccttcaagcaaggaatggataaggaaaatgtaatggattattactcacctgtaagagaaatgacatcatgaaatttgcaggcaaatggaaggaactggaaaaacaataatcagtgaggaaacttaaactcagaaagataaacatggtatgtactcactcataagtggatattgaatgtaaaggaaaagatatccagactataattatccagagaagctagataacaagtgagaccctaagaggaatgaatggatcctcctgggaagggaagttagatgagatctcctgagtaaactgggacaagaggcaggggcggtaaaggggaggacagggggaatgagaacatgcaggaatgggatgttagagggggggaaggggcagattgtaagatcagtgaaagagatatcttgatagagagagccactatttggttagggagaaacctggtgctagtgtaattctcaagaatccacaaagatgatcccagctaagactcctagcaattgtggaaaggatgcctgaactagccttcgcctgctattagattggttgaaaaccccatagatcatcaatgagcattcattagtaattgatagaaccagaagcacagatccacaaccaaacactaggccaagctctgggaatccagtcaaagagagggaggatggaatatatgagtaagtgaggtcaagatcatgatggataaatctacagagacagttgaatcaagctcatggaaacacatgaactctatatcgacagctgtggagactccatgggcccaaacttggccctccatatgtggttgacagttgggaaacttggactatctcacaggcccctggcagtagggccctgatacaaacatgatacatgagttatctttttggaggccatttcctgtggtgggatgctatgctcagccttaaaatgcatgggagaggggtttggttctgtctcatgagagcccttaccctcaaggaggagtggatgggggattggaggagtcaaggaggatgggaagagggttgggaggaagaactgaggttggaatgtaaaattaaacataaaaaataaataattataaaaacaaagaagacaacataccacattctctcaaaatgtccatatgttagtttactttggtaaaattgaaattcaacaatttaacagtaattttattcatcactctacaatgggtatcaaatttagagcttagggannnnnnnnnnnnnnnnnnnnnnnnntctctctctgtgtgtgtgtgtgtgtgtgtgtgtgtgtgtgtgtgtgtgtgtgtgtgtgtgttttgcactgcctgggtatcacctttcatgtatcaacttccgtgtatcctactctataactttcgatattttgttttctttactgagcgtgaagactgttgttttagccagacaaatgactaacaagctcttaagacccatctgtttctctccacactaccaagaatacagacatgaggagcatcagcaaggattctgggaatctaagctcaggttctcatggttgctgcatattgcacaaattacaccatctctccatttccctagagattctattttaatgtttagttcattcaaaatggtagtaaattgtattatggggaaaagtagaaagcattactgccttactaataattttataacacataaatatttgaatttcaaacatgagtgtgctttaattaatcaaagtaacaaagttactcctgaattgcttacaataataagccaaagtgaaccatcaattaattttagacattgggcaaggaagtccttccagaagacatcaaatatgtcacccttcctactctaagctataacacattgggtaattctgtctggagatttaatctcctgatttgttatctaactttttttgtcctcagtcactgtcatacactaagccaaataattagtgtcaaatgtcaataccataattctaagttaaaaatcaatgttgtggtgctgttcccagtggaaaaagtaaggataataatgatgaaacactatgcttcattgctaatcacctactaaaatgaatgacttcattagaatcatttccagtttcatttctaaaatatgcaccattgttcttgtcatgatagaactatatgaggcaaaattatttttctccaatattcttcttgttccattttctccctttactttaaatttacatcttctttttcaaaattagaatttggttgaaaatggcagagctagtatataatttccattaactgggaaatcctacattttcattgtggaagcttattatatcaatgcatgttttgatcttagaaaatatgagtattcaatagaggctattgcaaaattcagtggtggagcacaggtactgaactaataaaagagtggattaaatgctaatcacagcatgtatagatagattgtagacagatgatgatatctagattgaaagataagcagattgatgatacatagatacactttatatataatgtatgaattcatgtatgtgtgtgtggtatgtgtgtgtgcatgcacacaaatagccaccaaagttagttaacaagcaatcattgctacattttagtttctagaagcctgtggaattaactgatctaacctacattcatgtattataattaatatgataaattagcatacaataatactcattgtacaagaaaagaaacaagaagagtaaattttatctgactgcagaaattgtcctaatcaatgcttgctttgttcctaaaatacagattctttgttcaggataccttagtcatgagaaagggtttccaacagatctaattttaagtataaacagcttctctttttctctctttaaaagaagcaataagccatcgtgcttgttcatggtgacaaatcacagaaaaatgcacctaagtatgagaacagaaaatacgtggtctcacttgaaaaacttgccaattgaaaatttccaaagaaacataaaaacgtacagcattggatgtcaaaggcctttttgtttgtttgtttgtttgttttatttttgaagacagagattctctgtgtagctttggagtctgtcctggaactcgctctgtagaccagtctggcctcaagatccatgtgcctctgcctcctgagtgctggaattaaagcaaatgccaccaccgccaggcaaagatttatttatttttatgtatgtaagtgctctctctatatgcatgcctttatgccagaaaaagacatcacatcccattatagatggttgtgagtcaccatgtggttgctgggaattgaactcaggacatctggaaaagcagccattgctgttaaccaatgagccatatctccagctctgggacttgtaagtataaaatccttccatataacaaccctgagactaataagttctgtgacatgaaaatcaaggcatcttatcaagtacattttacatggacagacaaaagtcataatatgaagttcttccatattcccccattttaaactttaatccattttattttatttttatgactgtgtatgtatgtatacatggtacaggcacatgtgcatgtatggaggccagaggacagcctctacttacatttgtagaagatagtcaaccttcattgagaccaggtctctcattggcatgaagcttatcaaagagatattattgactggactgtaaaccaagagaatctctgtctccttattatctttgggattataaacacaccagactacaaaacctgatgcccagtgtcttggcatgggagctaggactcaattaccaggcagctttcctgagaaccatgcagtccctcatctacattctccttccttcttcacactaagtgtttatttaactttatcagttcttgttataagcacagcttttatggctgagtcatctctccagcaccttttatgaagagaaaggatgtatagatggggggagggaaaaggggagttttggtggagggactgagatgaagagcaggagggaaggagggagaaagggagggagggaaggaagagaaaatgtgatcaggctgggaaaaattaattaattaaaaactctatcagtttttgtgatgtgcttcagaaagaaaaacagaatcaaagaatctgttatcttcacttatctcataacatacatgcacagtaatcatttaacaattttaatgatactgtttattctgacattgttaattaggaggagtccccaaggtttctggctatattcactggtagaaaggtagagtgacatttctctggttttaggtttaatccacagaagtgtaaagatgaacaaaaaagaggattcccaaagcacagtgagaggaggaatgctcatgtttaagtacaactagattgaaatcatctaggagacacacttctgaacaaggctgtgaggatgtttctagaaatgtttgactcaggagataagacctagcttagtatgtgtagacatcccataggctgatgtctcaactgagtataaagggaaaatgggaaaaaacaaacaaaacttcaccattcacccctctctgcctcctgactacagataccaggtacctgccacctcaagctccagatgccagatctaatcctgtaaccatgactgtccagcctgccaacataacttttctgctataataaattgcactcttaatccacaagtgcaaatacacctttcctccttatattgtttcttcatgtattttgtcaagcaatgttaaaattaatataaaaacagaataaaatcaggatgattcttaacataatttaaacaaccctgatataaactctcatttgtgtgacataataagatctaaatactgtgaaagaaattattctgagaaattgatgcctcttgtaacagaagacaagcagattaactttgccaaatttttggtagattttttttttgtttttgcttttgtttctctttttcaagacatggtttctctctaattctggagcctgtcctgaaactctcactgtagacaaggctggcctcaaactcacagatatccacctgcctctgtctcccgagtgctgagattaaagtggaccaccaccacctcattggtagaatctttagtttaacttcacagtttaaattttgccttagttaatatgagaatgttagagaagaaatgatggaaggagatacttaatcagtaataacatagtccattttcaaaacaacacaacttttccttagaatctaatcttttcttgaattttccccaagtttcttattaagggatagctatagagagctgtgattattctaattatgaaatctccatgatcaggtttaccagaaagaagcacctgctgtcaagtctgatgacctgagtttgatcccagggactcatggtagaaggagacaatctagtcttgaaaggaatcacctgacctccacacatgcactgtgtacacaagcaccttctccattcccccacacacaggcaagaaaataaaaaaataaaataaaaaagaatactggagattaggtacctttcctaagaccatagagctagaaattgtcaaatgctatattgaaatgcagaaatgtcataaggcttcacacaacttttagaattatcatggtggccaaagtacttggcttatatagaaaatgaatcttaactttaaaagataattcaggaaacttcaaagggaataggactgtagatgaaggctatttgggtgctagccagatggatggatagtactagaaacttctcaaaatgtgctgaacatcaactgttgtgatttggcctatggagactctatattacaataatttagtgtttcatattccttctccagttgtagcataagatattaaattaagagttaattaaaactttaccttatcatgaaaagtttttatgttgatatgttctgtgaagattatttaaaaaataggtatctggattcaaaagttcacattctccatgcaagaagatctcatgtaacaaaacaattagtctgctctcagaaaatagatttttcaaaaatttccaagatattgataattatagggaaatattattagaaaactacagtagcacacaaaggaattctaaataatattagtttgtgtttagattataaaatccaataattccatgtgaactatattgtttatataaacatatagtcttattttaagtacttgataataacagtacccatcaagctaaatcatttgatttcaggacatttggagtgaatatatttttgatgacatggaaaattctttcccattgttatacacacataatatgcttataggatcagttatttagtatttcaattttgataatatattttatattatcaacaagacttgtgaaataattgtaattaagacagctacagagcctttactgtccagatggcagcgatggtcaaacacaaattagctttacataaagcaaactagctgtagttcttactgtttataatgcaagctagcagtgtgcaacctaaactaactgttcatcatgcaaataagctgtttatagtgtaaactaactacttagaatttcctaccccaaacaaaagctcttcatctggatggtatgtatatgtggcaatgccacagaaaaatgtagtaactaaatagtttcgagtatttattacattaataacaaagacagatcgttaaaaatccaaatatttggcatttgcataatggtaaaccatctttatgtctagatacttaatgaatgacatagtccaccgacactgtaggtagacagggaacagctgttgttcaacctactttgtattgtatctcttgctttataattttttgcagaagtaatatgtaataattttgatagtttatgtcctgcacaaaattcgtaaaagaagaaaataccacttgtctatatggaaacatgaaattataatatataaatattaattcatttaatttgttccaaaactaatacagagatttacttattgcaaaaaaagaaaaactactcagcatcaatatcaaattccttttgtttggaaagaaacattggagaaatacaagaaaacccaactaagccatacagaaataaaaattactgtgttcatgatttttatcttgctaaaatacataatattttgagcgctgattataaactcaccaagttattaatcaacacctctctgttttgctattaataaagtaatatatgttttactgtgctctgctgatttcccaaatatccatgtgtatatttaatgccacttggcaaaatgaaaactgttctatatttgtatacctctctacataattgtgtcttgtacattaatttgtttatatatcagtgaatttctattatgcagtctaaaacattcaaaaaataaccatttgaaaaaacattcattgatttgtatattatacaacgtattttatgcagatttctatattccttttcattcaaaatagtattatagttgctgaatgaccctcattgacagttcaaattttgtctggccttgcttttctaggaagatgcacttgaatctggtgccttagaccactcggccaccctgacatggccttgcttttctaagataattacctgaatatttttacacagacctccagaagttctgtttcctatatcattcatccatgttcaaatttcagtttcaccttggccgtacacaggtgactgattgcatagatgttgtccaatgtaaatacattatagaaaaaagttttttttgcaaaacattctgattgatttttcaaatctcttcttcttggatcaatgtttttattgttttctgtcagaattttaactactgttaaacctcattaagaaaataatttctcattcaaaatactgtgttgttcatataaaatagaattactcatttgaatactatatatatttaattactaaaattataaagattatatatacataattttaatagagtgaattcctcatttacattttgtgaagcttattttgttctattataatttggggatactttttcttctcttatatattatatctaggccatagctgaattttcccctctctcctcctgtcctaatctccccatttcccttcttaaaagggcagtcttcctaggaatgacaactgaacatcacatatcaagttaagcaagactagacaccttccctatattaaggctagacaaggcaacctagtagaaggaaaagtgtcctaaaagcaggcagaagagtcagggacagctccttctcccagtgctaggatacccacaagaagaaaaagctacccaactgtcacatgtattcggagggcctaggtcagtcccatgcaagttccttgattgttcagtctctgtgaggccctatgagttcaggtgtggtgtcttcaatccctctggattcttcctctccctcttcttcaggattctctaagctccacgtaatgtttggctatgggtctctgcatctgtttccatcagttgcttgatgaagcccctctgaccacaattatgttaggtttctctctattagtgtagtagaatatcattttattgacttttgtttggttttgctagttgtacttggttctatcataggtctctgggatttcttgactttggttccaggccttcaaggcagtgttagtaatgggttccctctcatggcatgggtctcaagctggaccagccattggttgtccagcccacaatttctgaaccacctttatttaccccaatacatcatgcagacagaagaaattatatgtcaaaggttaacgctgggttggtgtcccatccctccactggaagactttcctggttacaggagatggcatattcaggttctttattcactgttgctaggagtcttagctaggatcactctttgacattcttgggaatttccattgagctaggtttctagcttgtccctgacatgctccccaattccagttctctgcccctctatccttcccacacctgatccctcctgttcctgtccccacccacccccagtctacctgtgacaactatgcaattccttgttacctaacctctatctacttctgagtgagtatataccatgtttgtcctactgggtctggattccctcactcaggctgattttcttctagatccatatatttgcctgcaaatttcatgattttttaacagctgagtaatactccattgcataatgatcaccggtcattactatcactcaagatcaatggacttaattcccattaaaaagacacaaaatataagaatgtgtgagaaaacatgatccatccttctgctgcatacaagaaatacacatttcagcatcaaaggtatacattacctcatagtaaagaagtggaaaaagactttctacacaaatggagccatgaacctagctggtgtagctcttctaatatttaacaaaataggtttcaaaccaacattaaaagagataaggaaagacacttcatgatcatcaatagaaaaatccacttgagatgaaatctcaagtgttaacatctatgtcctaaataaagtgtacctgaatttgtaataacaagaaaaaaaactttactaaagctcagatcacattctggagcccaaacattaaaaatgagaggcttcaacaccccactatcatcaattgatatgttgtctagacaaaaacaaaacagaaataatagagctaacagacattatgactcacatgaacctaacagacattgatagaacatttcacctcaaaaaaaaatataccttcttctcagcacctcatggaattttctccaaaacctaccacatactgggttacaaatcaagtctcattagatacaagaaaaatgaaataacaccctgtatcctatcagaccaccatggattgaagatggatatcaacaacaacaaaaacaatagaaagcctacatgctcatggccaatgaacagctttctactgaatgattactatgtcagtattggttgatgaataaaacactgtttgcccagtagaggcaggaagataggtgggactaggagacaaggagaattctgaaaaaggtaggcagaagagatgtcatgcagagaggagatgacacaccaggttatctctgctaagataagaccatgtagaaatacatagattagtagttactggttaataattaagacagagctagccaataagtacctctagccatcggacaacagttttataactaacatagtgtccatgtgcttatttggggctgagaagggtggcaggatcaggaggaacaagaaaactccagcaatatacatatgtatttgtgtgtgcttgtgtatacacgcatatatgcacagattgtaggtttgtgtttctctctctctctctctctctctctctctctctctctgtgtgtgtgtgtgtgtgtgtgtgtgtgtgtgtgtgtgtgtgtgtgtgtgtttgtgtctgtgtgtgcatgtgcatgcatgcgtgtatgcgcacttgggcatacataccacatcacaggtgtggaagtcagagaacaacatgaaaaacatcagtgctcatgttctatcttgtgaggatttatgtagtgatatatttttatgatttaataaggccactgaagatcagaatgcaaagctagccacagccatagaatctgggcagtggtggcacacacctttaatccaggattcaggagacagaggcagaatgatctctgtgtgttcaaggccactcagggctacatgagaatgaatcaatttaaaagagaaacagagattttgcctttaatcccagcactagagagaatagaaggagcttagtgcagtctcagcagtctgatttttgggtggagagcactgcagtctaggcagtctgaggaacagtgtacaatcagaggacaaattcacccctttggtctgaggattgttagaggtcagaactctcaagtatcttggctgctttgcttctcttatcttcagcttgaaccctaatatctgactctgggttttatagtttgtgttacagaattaagtcaggttttcagttttggtgtcatgtaccttttatccactgatctatcttgtcagccttgtaatgatatctcatatatagaaataaattatattttgactgaggcaatttttgtgcagttaaaattggttgaaaagaaacagaaaattttatctcttggaggtagtgaaagatagggtacaaatgcagccaaattcttactccctgtatctcatttataaatggaaaagtaaattctaagtaatttcagaaaaataaaatttactagtacaagttaattttttcctattttactcaaacagaaatggttccaatggaaggccagatttctcaactcagcacaatgccagggttatgcaatttaaaacgataaggatgtgactatatgtaactgactagcttcattgagattttatttctctcttttgttggcatcaaaaacagcataaattaatatttctttttggctacccatatatcctctcagacttggaaacctgggagcatatttcacattacgctgtattcttaattagccagctccatcctcttattgaagcatttttaaatacccacatatacagaaaggtagctgacaccacttgactcataatgtgtgaataacacacagaattgagtagtatttataattcatctcctggaaaagtttatctgccttctttatatactggaacatcaacaaaattatcagttcatatagtttcggtaaaattcaagtttagagtagattttaatagactttattattaatataaaatttaaaactttaattagaaggaattctaaaatactgcaaattgtatcacattttacttgttgtttctcccaactaaactgaactgcaaatacaaaatattgaatatgtaatgggatttgtattattgtaggaaaggaggaattttgatgccaggaaggacaaatggtttgtgttgtatcactaatgatttggtactagagatatgaatctagccaacacaaatcagaatgagtacatttctgctatcataatatcatgcataccatggacagtggtcttggatttaaatgtatgagttcttaggaacagttaaatctataaatgtaatagaagtgtatcagagcactagacccacaaacttagatgaaattttatcagaaacatatccaaattgaaagtaaaacatacccaacacaaggaaataacaaacatttcccattttcttagatttggaaatgaagttgcatgtagttttattagaatggacactgctgtcaaagttataataagtactgtacacacactatttgaaatacatcaatagatgaataatttatcacatctaagtattttaggatttaataactttatttatttcctgggattgcactggcattggatatttatcatcatccaatgaatttataatatggagtaacgactaagtgaactcagcattacagagcaattcaaaagtgttctctgtagagtgtagtagtctgccatatagacagtgaagttgggtgattgattatgggaacagaaccatcattatttgcagttccatatactatatccatgccaagtcaatgtcaacactgcttctcaatgaaaatatcacagtgatgcaagaccacactgtgctccaatactcaggaactaagacctttagagtaattaagtcacaacattctacaaggaagatggctgcattagcatgcttctctgctacatgaaacatcttttcttgacacatacattattaagcctatccaaatggagagcaaataactgccttagttaggctatacttagctagggtttactatttatagagatttggatcacactgcccatgcttggaaatttttttatcacaactcaaaaaacttgaatagagtggaagtttcccatgtttcacacatgcgttattttctcttgggttagatactactgttgtaaatattaggtctgatatattagttatttttaccccagttactttacatatacaaaagaaacaaattttccactactctgtaatactttgaattttgaagaatccagtaatctctaaagaattagaacaaccctggcatgcaattcgtgctcagtgatttgttataataattacaatgttgtgactttcagtgcttttggttaataaagtttgccttcctttgccaattaattggtcacagttattgaattcctactatgcgttcttttttataattattaaaatgagaacatgaagatcttgatatgtcagttacaaccacctgcatcttcttatttgagtataaggagggacagagttaaataaaccaccctttctgggacgtcattctggttctttgctctagctatccacactgctgtcctgtatcccacatatcacattcatcaacagagaagtgaagctcttcacacttaaaaaaaacaccaccaaacagaggacagaaagaacatgtatgcttacaagtgaaatctaaattttatgcttctgttgtctactgctacatcctctcactgctcacacacagtggcaggaaacgttattagctccaggaaattatcaaaagagcctttgaaaggcaccgcctaggttatgaaagaggatcaataattcagaaaattatatataaatacttgagtatactattgaaatgtgtcgttttggcattttgatttttttagatttaatgaaagcacatttaaaacaccttccaggggactggaaagagagctatgcaactaagagtgtgagctgcttatttagaagacactggttcagttcctgacactcacataggacatctcatggccacctatatctacagcaggatcacagagtttctggattctaggtgcacctgtacccacagggaataaacacacacacacacacacacacacacacacacacacacacacacacacacacaccttaagatacaataaaacattaagaaataaattatctttcagactcaaatttaacagaaattaatgtcacattgctgttactatgtttatactctaatttaatacagaaatagtctaattcttttgagaaattactaaaaatactcaaaatttaaaatattaattcaatgaattctaagcatttggtactttatctttcgatatcttatccatggagagtgtagtttcttatttatgacaactcttgcttttatcaagagttttatcatttgtcaaaatcagttttttaacaccaaatttcaggaacagttttgcttcagtagcatttctgtgctaagtctttttccataaggacctttgagatctgtgggcttacactgtacatttcaatacattagctgttgttggtatgcattaccatcattgctgtgtgtaaagtctttgaagacatatttagagacatacagaacttccattttgatatcatggctacttcccaagaacctgtaactggaattacctgaactgccatactatttaattatagctaactgtcctatgacaatataaatctgaacttattattaaactgtaagccttctgtcattaacttgtaaatctcaggcactagagccaacttgatcatgcagtcagcctgccagttccaaagagtctggtgaccaatagccataactttgccagtctctgccagatattgtataatgaaagtaaatgatgtgtggagagtataatcaatattactgggatgtctataaggatgatgaatgactggttttggcagagtcaactgctttgaatagaatgtaaaacatgttccttcgatggtgccaatttcctagatagtattgtcatgaaaagagatgacctagagtcaagtaaactgataatcaacacagctcttgggcaatacataaataatatgtgttcaatttatcgagttgatgagtacaaagatgacctaaagtcacaatactctttgtcatggatccagaaacaacagttccacgcttaaaataagagttttcaatctggtcaattttgttccccagaaaatattttttcagttatacattgtgccatactactaggaaacttgcaaacagaggtagagaattctcattatctttcaagaacacagcttcctgtatattctcctacaaagacttatgcgacccaaaatgttaatgtggatagtgataacccaagttatagtgataacccaaacaaaatttaactttgtctagtgaaatggctcagttgggaaaggcacttgctgttgaccacaattcaatgcttaggacagacatggtgtaaagagaaaatagaatactgcaagttgtcctatatatgctacacaatcatggtggcacatatttccctccccataatacacacataagatgaaatttgaacttcagataatcaacttcaatgggataaagtcaggctattgtcttctatctggtgttcaaagatgttttctcatcactgctgtccaatgcttacataaatatttatacaataaaaataaaaatcacacacacatagagaaaggaacataattgtagatgcatcttatggcatgaggcttattcaagtttctatcagagttaatagctatttgaagatcatcactaaaaataaaggcatgtacttttaacattaacatatatgtgaaatagttaagaactttgaatgtatataataaagttaacatttgaataataaaaatataactattttttataattgtctttgcagatattctgtaatgatgatgtttaaacaaaaattatctaggtgtctaatttcttattcacagttaatcattcaatcagtttttgatgagtgtgacctaagagctcaacactagcttctcacttttctaaaagcctgtgttgaaaatcaagactcgaagaacactgagggggatgtgctccacactacagtgagatccacgtaagccccatcagacttcagcagggcaacaatttccacatgtttatgagttcacgaatcacttgaaggtacatcttgcaaaatgatgagtaccaaagaatgcagtttaagagaagtgaataggaccctcgagtgcatatttttaaacaggccttagggtaatgtaactggtttccacaatagtttcagaaatattggcttacttttagtgttccaaaattgtaatccacaaatggctcaagagggaaagactgaaagcttgggtattatacaaagtattgttcactccttagttcaaaacacatctgccaagaatggcagtattaaggtcacagttataaataaaacagagaaactgttaaaatttacactacagtgtaaagaaactgaaacagaaaaaaaaaaaaccgataaactttacactacagtgaaagagacaaacaatatattattaataccatgcagaatgtatattaatagttgtgatagtgaatgaactcaagatttgtttaatataatttaagaaattcttgtaattaaattttcttcaccatatggctctctgtgaggactcatgattctgtcatgcagtattgaaatgtttttttttcttctttttaaatttacattagaaacaatattgttttacatgtcaatcccagttccctctcctcccctcctctcctccccccactgatcccctatcccatcccctttttgttccccaggaaggtaaggccttacggccataccaccctgaacattcccaatctcatctataggggatcttcaaagtctgtcatatcatttggagcaaggcctaggccttccctcatgtgtctaggctgagagagtatccctctatgtggaatgggttccccaaatccattcatatcctagggataaatactgatccagtaccagaggccccatagattgaccaggcctcctaattgacacccacattcaggaggtctggttcaatcctttgctgatttcccagcttacattttggggttcatgagcttctccttgtgtaggtcagctgtttctgtgggtttctccatcctggtattgacacctttgctcatctccgctccctgtctgaaacttggttttaggagtttggctcagtgtttagctgtgggtgtctgcttctgtttccatcagctacaggatgaaggctttaggatggcatataagttaatatcaatttcattaccagggaagggcatttaaggtagaccctccactattgcttagattattagttggggtcattcctgtagatctctggacattttcctagtgccagatctgttcaaacatataatggttccctctattatggtaactcttttcttgctctctcctattttttccctgactcaatcttcctactctctggtatccacctctcccctcctcttctccccttctttttttcctaacttgctttcccttcccccatgctcctaattggctcaggagatattgtccctttccccttttctaggggatcatgtatgtatgtctctcttagggccctccttatttcttaccttctctgttggtgtggactataggctggtaatcctttcctctatgtctacaatccatatatgagtgagtacataccatgtttgtcttttggtgactgggttacctcgctcaaaatggtttcttctagttacatccatttgcctccaaatttcaatattccattgctttttttttcaacagagtagtactccattgtgtaaatgtaccacattttctgtatccattcttcagttcaggggcatctaggttgcttccaggttctggccattacaaataatgctgctatgaacatagttgaaccaatgtccttgtttatagatgtgcatcattgggtatattcctaagagtggatcttgtggtagactgattcccattttcttgaggaactgccatactaatttttaaagtggctgtacaagttttcactcccaccagcagtggaggagtgttgaaatgttaatgtatatcagactaaggagccccgtgttttgcatcaaatgacatcatatatttgtctctaattatacatatattttcatttctaaaattatatgcttttcattttgattatcattgttccctgttaaaaatcatagataattaattataattttagaaggtttcttgtaaccttactcttacctaaaaattattaagttcatctgcttcaatgatgaagataagatgtagggcatctatgttaatactttttttgtttgtgcccactataagactctagactgaaagagtcaataagcatgactaaaacaaaatcaattaaatgaagtaatgtacagatttgaaaccaagagaatgtaaatttaaacatttattgattatatactttcttgaaaatttttgtacttgattgtaaatggtgtttaaagagatcataaaacaacctcattagactagatcaggtgctttcagggtggtatggtggtagacaagagaagattgcatagtcccttgaagaaggggatgggaacaagaacccttgaccaaagtgggagcctgggagaccgggaaaggaaggagtgccttcatcctgttgctgttcaaagcaaaaacagacacccacagctaagaactgaaccatactactggaattcagttgtggtgagggaggagggatgagcaaaggagccacaagacggggctggagaaacagtggacccgaactactgatagcctggagatccttgtcataaagctggggaaacagcatttgaccaaaccaagccccctgaatgtggatgtcaactgggaggctaaaagagtctatagggtcctctaacagtggagccagtctttatccctaaagtacaaatgcacattgggtgcccattccctatggagggatactattgcagtccagatacagcaaggagggcctatgccctcccccaaaagatatgacagactttgaaggtccctgttgtggggggtctcactatccctgggcaggagttggggctgagttggggggggttggttgggaacatgggtagatgggagggtgagggaatggggggatggatatgtaaatatgagtagtgattaaagaatttaaataaaaattaaaaaacaacctgattatatttactcataaattctttctcatatttgtgaaaagaacttggaaaatagaaaaaaaataacccaaataaactagacaaaccatattggaaacaacatcattttattcaccacattcatgagaataaacataattacaaaactatgtgggtcaacatttcaattagtattaaaaccaaaagcagaaaaaaattgccttttttctgggtgttaaacttcagtgatttggcttctcattttaatcctagagaactaatttttagaccaattctcaatcattgagtggctcatccccagtcattatgtggttcagcaatcccagtgaagcagagcagagttctcacagtcaaagcacaaagccttgtttctacagggctctcaaatgaaatcacaccagaaggaagaggttgcctgatcagagagtgagcattcatctctgtggatctgcaaacactgcctggtattttgtgtaagatgtggagaaattgcaagaaaggaaatgaactcctgaaggtatagaccaacagggtagggaatggtatgaaactagcaaaggggtggaacaaagaagggtgaattctcttattgacaaatgtgcattacaggatacaagatttgccattcaaaatttcagcaaatctggcattctgtttatttacttattgatagtcaagaatgaaaaaaagtaattattaacttaaaaatatcttaggttttgtattttaccccattcctatactttaaaggagtttgtttttcattactgatgaacacaaactttccccttaactctgtatgtatggctgcaaggataaggtgctgacagtaaactttgtaagccaacagcttgtatgctgagatactgtcatttacattggaactagacagaaataatgggtcccatagtttcactggtcaataattctgcttgtcaattgtttttaagtatttagtgaaacagaactgaaaataaactgaatacatttaattatttttttaaataataaaattgtgtgtgtatgtttgtgtgtgtgtgtgtgtgtgtgtgtgtgtgtgtgtgtgtgtgtgtgtgtgtgtgtttgtgttcgcacgtgcacacacatggtgactacagaagccagaacaggttgttcagtcccctgcagctgatttgacaggtggtgctgagatgctcactatgtggatgctgggaactgagcttaaatgctgagccatctgtttagacccaatattcaaatcttgtttacatgattttacagtttaggattgagatccacaaaagaagtactaataatccctaaagaatattaccaaagctaagttccagatattatttcatttttccctaaaaagtactgaagagggtgtggtaggaagagagtgaggggagaggggacctgtggtttttctagccattcagacagcatgttctcagacaggtgataagtcagtcagccaatgatctgaatcgtatcttcttgaatagagcaagaacaaacacttcccaggtatcagataatagtggttcccttctcttcaacttgtggatatttttgcatatttttaataattttatcttctaactcttctatattttttagattgggctttctatgccattcaggctgcaacaagatctctgtcttcaaatgactcctacctcaacctgcaagtggccaggagggcaaaagcaccattgtctgcccctggggtccaaaactttttagtgccaacattatgtggaatagaaaggcaactcttggcaaaataaagactgttctatatgaaactttgacatgtgaacaacaaggatttcagaaagatttagaaaactgtattaggggaggaaggatggctcaggcaatgacagaagtcccacgtttaattgtcagtacccacaaagtggaagacaaaactgacacctacaaattgtcctttgtactcagcaagcatgcttataacccatgtaaccacatactgataaatgaattaatgtaaaaaaaactatatataatgtactctttgtgattgaaaacactgatttgggcattcatatgacattattaaacatgattccactaggaataaaaattccagattggtaaaaagaaaacagaagtgtcactaatgaatctaagagctaagagataactatgattgttttatgtatttccctagtttctaatataaccgttcaggcttctaatttcatagtggttgacataatttgatgaaactgctaagagctgtaaaaacagacaatagtggttattagatgcatatcttactgtttagaaagtcctgattggcatataaaattgctttcctctatgaatttccccatcaacattataaaagaaacttatatgtaaaaatacaagtaactttaaatacacaaaatgttatgactgtcagaacacattctgtttcttggttaggcacaaatccttgctaacagcattggccatagtgaagtcatgttttaacaaatacatgataatttaaaatttaagaaaatagaatatatttttcagttaattaatcctgacaaaatctcaagaaagttcccagcccctgccaatctctgtgctatgtcagccccaatggtttgagtgttctgaaaactgagaaaacaatgtgtatgcaggtaagtgtacacaactatgagcctgtgtttgaagacttgacacatacttccttccttggtttctgtccaccttacttttagatggcatctctcattggtatgggaatggggcctactgattgtctagcctggcggaacagcaaggtgaacatcagggacttgtctgtctcctcacgctgcccatgactgtagttggaggtataagctgcattgccttgcaagtatattgggagtagggactccaccactgatcttcaagcttgcacagtaattacccactgaatcatctccctaagttgaaagtgaaaattatattaaaattatgtgactaatctgattggtgataagaatgttcctataaaaatatacagataagttattaaaggttacaaattagcgccacagagaaaaaaatagagaaatatattacttcaaaaccttttattagaatattgacttttaaagtctttgtttaggtgtaagatcatggtagctttggtttacctgtcaagttgctgagttattcaaatgatctataattccaagaagtaaagggtggtaaattatactctttcagtatagtctgcatataacttttaatttttcttatttttattttaatcagttttctaaatataaaggtatttcacttgatgtccccacactacacacttgttagaatatattgtgatcaattataacctttctaagaaatatgttattcttatttgggaaagcagtgaaaagttgcaaaatatattttagcatagtaacaagataattagactctttagtcacaaactgttctcttgccaagttaggcaacattccaaaaaccacatggcttccacattccgtgatgtgattatagaattttcactcacttaaaaagacatgaatgtattgaagtattccttcaaaatcttttccttaggcttgcaactatgtaagtgtttcaagacttgagtcccataccaagtaatgctagatgattctagaacatgatttcaatgaatatggttgttgaaggaatatatgcttaatttctgttttgttcttgttcagttatttttttaattatgtgattttcagaggctacgaaggtgaaggagaacagtgacttgagaacagttatgtaacagcatcactgaagaaaagtccaccagagaggtcatggccagatgatagctatgcgtgtgcagtccaagaagaatgtgaagagacaccacagaggagtcagagaaagataaggagataaaaatgctaacttccctgatcagtacatgttgcatcaattatataagttataccactgtacttctgaactatgttcaagtataaatcttaaacaattcctcatggtttaaaaagtcaagttctaagttccttgtttttctcagaacccagttctttcccaaaggttcctaatagttgcaccacagacattaagccaaactggacacctcttccaaatgccttaagaagttctggttcattgaaaatcatggtaaacttgataatgtctaaattttaatgagagaaataaaatgaaaattggaaaatatttgtgaataatcagtagtgatgtagaaaacacatttgaatacaacaattacccaattgacacatgcagttgctccagggagtcttccacactctcccaacatgtggagttcttgactttggaattgcccttgtaacttatgttagagccagaataccacacatatggcatgacagtcttgatgtgccctcaaatatggtgactttcctctgctgcttgctcttattacacaaagactaccacatgagtgagtctgaactcaactgcggagaacgtatgtaggaaaaccaaaagactgtgctggctgcttgacaaacacaaactatttcagtgggccacttaacattgtgtctctaatcctaatcattataaggatatgcacccatgagtgacacagcgaaacaagccacactgttgtggagtggtataaaatagtgctcctatgaagttgatatccagcttccccactctccagccttgtctatatttaaaatttctatttggaaggggttgtgctatgcaatgataagtaacagataaactgcaaaataaaaattatacattataaatttctaacttaaatggtggaattagagttagaagagaactagtgcatgtttagatgaggtgagttgtatatatatatattttttttactgtaattcggatgtaaatgtcaaaacagacatcctcaattgtgtctacattaagtaaagaactaaaactggggggcaagaataggtatattttgttttgcataagtcctcttatataacactaaaaacaccaatatcactatgtaagagcaataaatattaacaatatcactgtgcaagagcactgaaaactaccaatatcactaaataagagaactgacaactaccaatatcactatgtaggagcacctaaaactaccactatcactatgtaagagtgcctaaacctactggtatcactatgtaagagcacctaaaactaccaatattgctatgtaacagcaccaatgtttatgatcactatcacagtttctcatcttaatgtaatcaaagcataaggaagatcccttgcatctgtgggattatggattaggaagccctaacaccaaccctaagtgtatatatttaaaaatatttgggagcccaggattcctcagaccatctccacccaaaacacacacacacacacacacacacacacacacacacacacacacacacacttacttctgcttgaatattaaaaattaaagtttagtttaagatatatttttaaaatatgcataaattttgattgagtagtcccaaataaaataacaaacttttatcaagacacttaaaaatctccatctattttagacattatatgtttatggcagcattgtttggaacagatcacttagaaaaatgaatgtcattaaagaccagtataatggaaaattattatactattaaacagcccattaacaatgcatgttaatgatctgtgtcaatatccatgataatagctaaattgaagtagtcacaatattggtagagcaaaaattaagagtgtaaaaacagtgtaccgggggaggtacattctccccactacatttctgggtatcacagcagggtgacagtgtgtgtattaaagtctcctatggtgcaagcatagaatatttgattttgtatcaatagtgacatgagtcttataaatgacaatggtgaaatcatactttatggcattaaaaaaatctagtcatttgttttggaaagtaataaataactgtcacacaaattccaaaatagcaatactgttactctatatacttcatcgagaagaggctaataaatactttaagagagtcatgtaatgaaaagctaaaccaaaatgtgagcttatatggtccaggtaagttttcttgcttttctatgtatctctatgaagatacttttcaagacatatgagttttaaatgtcaaaaaaaattatttttaaaataatataacactaatatctatccactagtgttcatggttttcctatcagataaatagacaaatcttttaaacgcattggtgtattgcttctagatattgagaacttggaaatatacaacttatacctatgacctggatagaaaattaactattcattctcaaagtagagagaaaaataactattaaagagacaagtgagaaggaaaataaaaacacacaatggagaaaaaatgagaagaaaaagaggagggaggaagagagagagcaggtaaaagtaagaggtagaagagggactgaatatttaaactggaaaattaatttaggtattttagactttgggcatggctgtgttttttatatcagggcatactactgcccaatagtcattgtctgtgatgattgagaatatattttgacaacagtgtatatcttcttctgtttagattattttgctgtctagattaaaagcatattaattctgaagactaagtagagttcctcctgcccattaaactctcagtccatgtggcttctccatatgtcgatcccactcctcatctgtggctgtcattggctgacaagcctggcgtctccaacaccctgaaagtcccatcacacaatggtctcccctttacagcttgaagcactactttttcagagtttgtctggttctgtcacacaggggacaagatcaagctctgatcaggtccccacaaatatgggctaaaatggcttatgaatgccaaggcatctgaactcagaaagtgtttctctttgtatctgtacagatcagggcaaactggagctctagttttaaagccaaaactttaaatgagctcacaccctcataatgctgtcctgtgataggtggggacaggcaagtctgggaaagttaccatggcatttccctagtgtctcagagcgaaattcccagtggtaataacaaaagctgtgccgacgccttctgcctttgtttctggatatgctacgtctctggcacaacttcataatttatgttctctcttccttgtggagcatgcttcaattactattctgaaaatctcagataaattctttgaaaagctgttgcatgaatgtagtcttgtggattttcaagaacccttccttccctctggaacattttgagtatagtattcacagtcagctcttactggctttccggtctttcccaccagaccttgatgctaagctgagtttatagatttcggtgtcttttctagtgtgaccctgcacactttgcaaatgcccaccattgtaatacatcattttatttcaattgaaataagttatgttacctatgattaaaatttaaatgagtaatgttttaaaaagccactgaacagtttggatacaattgaactttttgtttctgtgtttgtgaacactgattcaggtagattacagaaatatgcataaaatgtttttaggtttcaagtccttttaaaatttgcttgtgcctgtgtgcttctcacctcctgtttaatctttgacatatacatgctacagtttctgtcaatcattacctaccacacagtagtacagcacagcttttcccatttgaatgtaatttctaagataatgatcagcctcttccacaccttcccctgactctcccagtctctgaaaggcactactctgctcttccctgaaatttcagctttgggacatctttaaataaccctgccatttatgtaaatttaccttctaaaaatataaaaattcatgccccattttttctcattttcaacagaatgggagcattcaatttggatgtgtacttttcttctattaaagcaggccacagtgacatacagtgaccgtggctgtgatgatgggaatgctggtagcagaacttgtattggcactgtggcctgaaactgatcctgtagccaagccctgaaaaatggtccctatttttggaaatgagttctttcaatgtgccctagtggaaacccttcaggcttttatgatttcctctaaacatttaaattcatgtcccgattatgcattctgactaacaattattggtttctttccaggaaataaaatatgcgttacgccatttccattcttattggcctcatgcggtctcctgctttctttatgatttgtaacttagtttatctttcaagtggtaaaagtaattttagtatgtttttgaaccttttattgaggtaaaaatatgaattaagtactgaaataaataaaataagtatgggataatgaatgataatcatgcacattaaaaattatggtattatggtatcacaaattggtatgtcatatttcatttatcttccatttatcctgtaagcttttgttaaactgaataaatagcagcattattctaaatgtgttatttagaattcagtattcagtgaagcttttagataaaatagccaatattaaattatgatcatcttattcacttatttactaaatataacatgaaaatgtcaaattagctcaggtgtttaattacatgacaaaaggaccactttataattgaagaaaactatacaatacttaatgtgctactattatgtgtgtatacatgtgtggccacagtgcaaaagtggaactcaaaggccaatgtattggagtatgctttcaacttccctttgtagattcatggaattgggctgagctcatctcttggaaatcatggccttctcccagtgagccatctagtcagctcccaaataacatttataaaatactagttatataaaattatgtgtcttctgtagaatgtactaaatgtactaaaagagagatccaagtgatatcacaatacataatactggctgttcttgcagaggactcaggttttattcccaacacccaccattgcctctatctctacttccagggggctctgatgccccttctggactctgcaggcaatgcatgcatgtgttgatcagaaatctatacaggtctataattaaaaattaaatattgacagatagttgccacacatatactatactatttgaaaatcatatacaagttattgaaaaatataaacattactaaaaaagtagaaatgtgagatgtataagtgtatgaaagcaatagttgctgcagaatagacataaaggccaggataaaatatatggggtttctctttgggaggatattgtgtatcaaatgttggcaatgtgctcaccatgtagccaaggatgaccttgaacttttgaacttcatatatctactttctagttctgggaatgcatgcccccactaccaaatatgaattatgcagtgatggagatccaattaatggatgctagacaaacgctctggcatctgaggtacatgtgcagacttgatggttatagcctggtgtctcgtgactctgcacaggaaaaagttatgaactgtcagtcaccatcactcaccatttggacattgagtagttcccactgaaaacagatgggacctgtgatacctcatggcatctcatacagacactatcttggagaaagtgagattttcctgtcaagagtcgcttgattagctttattatgtcatatttaaacaagaattattgaagttttaagtttacagttatatccagtgctctgcaatttccctatacagcaatctaaatacacgatgtgcacagcagcacaagtgccaaagcatcattagttaattgcatagttttaaaattatcataattttaggactgaagaaagcacaaggaaaaaagagacataacacattttttctttttaaattctgcaaagcagtttcagtaattctcatttaaattttaccaaggaatataatcccattttctaaaaccctttatttaataatacttggattttttaaacataaagtcctgtttccccgaagtcaagatgacaggaatgctgacgttctgatcattttctacttggaattcatttgatgaagagacattttcataggttataatgaatcaatgcgcttagaaaaactgtcttgtaatgaatgtgtgagggaactggaactatttagtcacagagctgagctttcatggaagacataaatagctgctccaaatataggtgggtttgcaatagggcaggtcctcctctcacatcaatcatcaatcaagacattgaaccacaagcttgcacaaaggcccatttgatggggtggtttctcagttggtttcctgcttccaaaatgactctagcttgtatcaagttgacatagaactaatcagcgcagtttaaggttttcttctttctccagtcctctttttttgtttgtttgttttgctttgctgtttttccagacagggtttcattgtgtagccctgactgtcagggaactagtcctatagacaatgttggtctgagtcattcacagtgatctgcctgcttttgactccagagtgttgggataaaaggcaggtaacacccccacccagcatatcttccaaagttctatggtagttcatgtaactaatactgtcctgattggcacttgactctgtttcacagatggttacccgaggaagggtacatcagtgatgagaacatggatgaagttagtcaataggttaaagagctacagttggcaatagtgagtcccagtgttcttcccttgtgtaggggagaggcaaagtgaatcagcaacaatgtgtcattttttgaatgatagtggaaagacagatgtttgaatgttctcattactaataaatgaaaaatagagatttgacatagaaaatacaacattgttttggaattatgcaaggtatggtcaggctttgcttaattctagaaatacacattaaattctctctacaactccaactttgggaactttgcttaaacttccctatgttcttttaagggtgtttgaggtaatacacaacctgagagaagctaggaagtaaggaaaacctaaaagaaacatacatggacccctgagaagtggaaagggacaagatctcctgaataaattggaaccacaggggtgggggagaaagaagagaggagaaggggagaggggaggagaacatgagggatcagcaaggcccagttggggaaacaacatggaagaagagcaaggaaagatataccttaattgagggagccattatgggcttaaggagaaatctggcactagggaaatctccaggaatccacagagatgaccccaactaagcatctaagcaatagtggagaggcttcttaaatgcccttcccctataatgaaattgttcactaccttaaatgtcatcatagatctgatagaagcagaagcagagattcataactatgcattaagccaaactcctggaatacaattgttgagagggaggacagatttgcaaaggggacaagatgatgctttggaaacccacagaaagagttcacctgagaaagtgtgagctcacagaccctagtctgacagactgaactaggacccctgaatgtgggtggcatttggggggtctgggcagtctatgaggcctctggtagtagaaccagtatttatccctagtgcatgaatgggctttgggagcctattcctatggagccatactctctcatcctagatacatgagggatggactaggtcctgccccaaatgatgtgacagacttagatgattccccaggggagacctcaccctccctggggagtagttggaggtgggatgggggtttgtggggggaatgggaggaacagggaactgggattggtatgtaaaataagattggttttaatttgaataaaaattaataaataaacttgatatttacttgtttaaaggagtggggttgagagtcaaaaaggtacacaggttgcatctgtgctgatttttaaagtttaaggaaagtgtgtatcaaatgaaaacaaacccaaagatgactttttacattattatgtgaattggtaatgacttgtaattgactgaaattgcctatttctatgaggctaatattggtgagctagtgttttctggatttgtcctcctctgtctctgaaattataactgttgaaaagggtcagctacttcactttccttcctgacagacacaatggagaagctagactagaataaatcacaattggacaaagcaggctgaatgggcagctttcactaatcccaggacacaactctgcagtccttgacatggatttaagggcaatgatggtaggctcttcattggatttgggactagtttcaagttcacacctccttctatggacaaggaaggtaaatataaaaggaaattgagtttcagagaaaccagggtcttcactcacatatgtgaaggtaactgagtctcagctactgggaggcaagctggaataggaatgtcatttttccttcttcacattaaacatctactgattaattcttcattttatccagattgttgctgttaaagaattcttgaatacatcacaaaaggtaatgttaattattactaattaacagcaatcaagacaggatacaaacacttaaactgaccagatccaggcagtggtagtgagagcctttaatcccaacacttgggaagcagaggcaggcagatctcagtttgttccaggacagccagaactgttacacagagaaaccctgtctcaaaaaccaaaacaaaagaaaaccaaaatccaaacacaaaaaacaaacaaacaaaaacaaaaaaagaagctgactagaaagcttattccataacttggaatacaaatcatttaccacttaaatgtaatataaagaaagcaattatatacttaatgaaataagtctaacaaacctttggaactccaccgtaaattaatatccaaacacagcaatgatatggaatattggcttataatacaatagataaatattaagctttaaaaagcttcctatagtctatttgaaaattcatctcaatagtttaattttatgaataatgaaataatggagaataaattattagactatatatatatatattattatattaataatataattattattatattaataatagttattatattattcaaactactttatgttcacaagtgttttatctatgtgtacatatgagctagaaaatgtccgatactctggagctggagttccaggtgtttgtgagccactatgcgaagctaggacagacctttagttctctgcaagaacaacaatcatcaaccactaagttgtctctgtagtcccaatgtccagcattttatcaaatgggtatgatctatagtatcttttactaacagtaatttatatgattacaatcattcatcataactttaaaactttggttaacaaatttttgttttaatttcaatttttgtaaatctaagtaaatatattgtctttgaattataggaaataagatgaaatttatttttcctttatatcttagaggaatgtactttcttaatagtatttttagataattattatccatttatggatcatatattacactaaagcataaccataatttctaatttttataaaaggaaaataatgataacgtgaagtatgtttttatagcaaccaacaaaataaggctaattctaattctaaggatttacaaactatgaaaattagtctaaatttcataatgtgggaagaacagtgttgaaataaatgatatctatttcatttaattttttttttcaaggcagggtttctctgtggctttggacactgtctggaactagctcttgtagaccatgctgatctggaactcacagagatctgcctgcctctgcctcctgagtactgtcatttaaaaattttaaggagtacttgaactaacctgcaacccttggccatggaatgataaaaaaacaatgatcttaattttttaaaaaaatacttattaagtttagtcttatgtgtatgaatgctatgtctgcatgtttatatatgtaatgtgtacatgcagtgcccacagaagtcagagcagggagtcagaacagaactcctggagagggactacaggtggatatgagatattatgagcagcaaatgctcttagccactgagccatctgtccagccccaatgtagtaagtttttttatttaatatcctttttattgtattaaaatttaaagaattgaatacattaatactacatttacaccattacaacccctcccacagacctccctacttcttcctaaaccattagtctttataaaagaataaaataagacattagattacaacctgcaaagacatcccatttttatgaccatctaagatattcatctttgttggcatgtatgtgacatttatgttaccattgagacaccaaaccagattcaggtaacagtactagtatgtgtaaacagattttctttcccagcttttacacagcaaccaagcacattctttagtaagaattgaatttcagagaaaacttaatttctctgtctgttgtctgtatcttcaagacaacacaggaaaatccaattattaactcatgttaattctccattcttaaataagaaagatatccctcaaaaactgcatttaaaagcttggaaaatttaaagtggtctgtggataggaaattatcagcaaacttgatatgagaatttatttggacactggaattacagtgacattgagtctgataaggaccatcacctaacagctgtttgtctattcccaaagataattgtagatcttagttccttgattttaaaattaatcaagttgcttcttaatttccccttttgtagtcagagtctcaaaatgtggcctaaccatgtcatgaactcactgtgtagatcaggctgtctggccctctgtttcccctagtctaatggagttctgggacagaaaatgagaaactgtggctttaaaacatgcatgatttaatgtgcattatttattacactctactgatttccatagcaattgttcaactgttttcctgcctctaagcttcatgttctatactctattctgtagcattcttcacattacatgtagtgataagcctttaaaacctaatgcatggggctagaagatggatcagcagatcactgaactagaggatccaacttcacttctcagcacccatgtgcacagactccaaccattgttatttccaactccatggactctgacatctcctcatcaggtttctaccagcactgcattcatgtgcccacatcctacatacaaacacacacatacacacacacacacacacacacacaatgaacaagaggaattcatattaaaaaattttatactacgtgtaaaaccaaactcagacaaatcatgtcatatcatatgctactcaaaatcatatcatcactgtctgtatcacacagaaaaggaatcccatcttaatcttaccctgtgaaagctgaattggcaggacatttcagaattcattccctctacattaaagccaaattatagtgtcttatgctggttaggacaagcaagcttatgtcctagggactgtatgacatctcatctgctgggaagacctttgtccagatctattcatggatgaaatgcctaccttcagatgctcaaggtcatcaacatgaagagctatatcctatgatagagtcacttcatttaaacttcattggaattttcataattttgtggcattgtctacttcctcccttggttttattattttatatactatattggttgttatcataatagcgtcactgatgatactgatgaacttgtatttcccagcatgacatattcaaaaggcccattttctgttcactgttacatccttaacaatgccaactattcaatcaatttcttcaaaagataaatgaatgtcagtgacactgaactgagaaatctaggttcagaagcaatgtttagtttattaacaatggaacttacatgatatcttttacacaaacacaagcattctgaagacctctttggtgattttccagacaaaactaatatgctaatatacttatcagtgcaccatgtttcaataaagcatatgatttccaacaaaggatttcatatgtcttagaagttcacaatctatgaaagaaacaataaataataaaagaaatgatcatgtattatatttaagaagtcacattttaaaagttaatgcaccaattcatcctaaatattatccaaatggtgtcaatttgttgcatacaactataaatgcagtttagaagtgagttcttattctgcagaatctcatgagttgatatataggtgcccatcattaaagaagaatagtgaaatagatttttgtgtacatcatcatcattgccccaaactccaagtgtttatggtttcaataggatataggtgtgaccataactgcttatcctactgctagtgtctactgagcaatactttctcttcatattcaaacacgttcaacttgggataataaattacagttatttggacacagatctgaaggtcagtgggaagatctggggaaggtgtagtcgttatagccatgatcctgggaacaagacactctatgacttgtttctaaaatactttgaaatttaaaggtcaaagagtcttaaaaagctagccaaaaggcagagaagacaaaccaattaagtcagaggaaatcaaagcaaagttggtgtcacagaggccaagggaagagcatgtttcaaagaactccatgaatgatactggtagcaaaggggaaatgaagacagagggcttgccagagtatgaagcaacagaaagatcattactgacattaacaatagatctaccgcaggaaccatagcaaatggaaagaatggagctgcagaaaagaaatatgtgttcttaagaggttcgctttgaaaggttgtaaaggaataggactgcaaaggggttagcaacacgagtattttaagccaggttaagtctcagcatgcaagtgctgaagcaagtgattcaatagaatgtgacaataagtggtgcttagaaaggagacagcaattataggattgatgcctacagaaaggaaagggagaaaattaacagagattacatttgtcaagaaacttgtggattttgtttctgacattttaaaaattaattttaacatgatacataaagactaatgaatgtacagaattatgagtgctgtacaatttatttaatgtcaatgggatatgaatacatatgtacacatacatgcatgcatatgtatagtggaggtttgaataagaaagacccccatagtgtcatatgtttgaatgcttggttgccacatagtagaagtattctaaagtattatgcggattagcggtgtggccctggaggaagagtgtcactgggggtgggatttgaggtttcaaaagcctttgcttggcccagtctgtctctatctcagtctcagtctctgtctctgtctttgcctatggatcagcaactgctgcagtacctttttgcatgctaccatgctcccagccatgtgataatggactaaacctctgaaactgtaagcaagccaagatttaaatgttttctctcataagagttttcctgatcatagtatgtcgtcacagcaataaaacactgacaaagaacacttacaatacagacattcaaaatcttctaccattcataacaaacactgcctaaatgctgtcaatacttaactttactgtggagagcaaagtggaacttcttactttttaacttaactaattctaattcccaactccttcctctagcctctggcaaccatcattctactctgaattcttagcaggttaacttccttttgaatgtacgtggaaactgagacagggttacaaactatgtctggatcattccatttagatcatctccagttccatctatactatcaagaatgtcagagtcccataaactttcctggactaaacaacttctattgtatgtgtgactgttctctttgcttagtatggcatatgctgtagaaaacatgggcatggctctaaccagcttccttgtagaaggaataattccaggagcaagtgagagcatatttcatcttaaaatcccacagaaatcccctagtgggcttattgttttctaaaatcagcattatcttcatctgggaaaaatgaagtgccattggtatacagaaatgaataaaagtgggagccaggtgtttgagtaggatagaacagtgttggtcagatcacatctgctggtaaaactattagcattacatgagagaacttattagaaatgtagatggtcagatatctcattagatttttatactttacatttttttattcgttcaaattaggaacaagcttgtttcacatgtcaatcccttctccctctccctctctctctccctctccctcccctcaccaacaaccctcctacccgactccgacctacccccaaccccatccaccctccactccccaggcagggtagggccctccacaggggctccataaagtccaccacatcatcctgggttaggcctaggccctttcccatgtgtccagggcaagagtgcatcccttcacatgggatgggctctcaaagccccttcatataccagggaaaaatactaattcaccaccagggtccccctagagtgcaaaggcctcctcattgacatccatgttcaggggtctatatcagtcctgtactggcctcccagacagcgtctggggtcaatgtgttcccccttgttcaggccagctgtttctgtgggtttcaccagcctggtaccgaccccttcactctggtcaattatctcattagattattataccttacatttttacaagtggcttgtgcacctctcagctctaagaggcacttaggctaaatgaagagaacaaattgacaggttaggatgtgatggaactatgcaaattaggtggggccatgattttactgtggcattagttgggtatagccttcagaggtcatctcattaatgatactttatctgtctctacttcaaagtcatctgtgcttctccagtgggtgtcctactgtcagtgaatggcacctcaattccctgccagtgttgattatgttcagtatctcagaccagtgaaatctttcatggagtcctgtggttgtttccactgacatctatcccacatatctctgcaggtctttgtcatctggacccttgacaaatctccattatctctacctgggtgcttttgagagactcctcctcattctcttcattaggtctatagtgctatctcctcctccatattctaagactcataaagtactaagtggagcattccaaactttcaacagcctctccacaagcacagctgagatataactacaggaatttaggatgtttcacactgagaagttcagacaggagttgtaaattggaggatttgaaatccacatgtaaacacttgaagcaaaaataatcactaagattttcagaggcccattgagcatctacagggataggcattggaagtttgttacctccattttaaaataataacattcaggattgcttccagttaatcataaactctgaagtcataaacactagagttatgaaggaaagaatgatttgagaataaatccaaagtatgggcttactttctcattatggtgattgtccagaggagagatgggctctgctttatttcctgatgtttgttttttcaagcaaggtctcccatagccctggctgacctcagacttttccagcaactcacattgaacaccttatcggcaaccatgtccagcatgatgggacaatggtgtgtgctaccatgagcagcttaaatgctttccttgtagttttcttttgtagatttactttggctgtctggtccctgtttttctcttttatttcagcctgcaaagctcaaacaaatctctcctctgacagtcctttctttctctgtcatttcggggtgcatgcctctccactacaggcttatttcaggtgtagggagcctgtttaattgccagttcctctgctcagtgatgcccagatctctgcatttccattttcataatcagtaaacaccagtggagaggctgacacagagaatgatgcaaaaatggttggtgaataaattatcgatgacaaatccatctttatatcagcccaggcttccagatttgtttgcaaaataaaaccacaggatgtactgattctcagcactcaaggaaaatattcaaggaatgtttgggattatgtgaacaggagatttacatagctctttgcctcatattttagaaaaataatccttaattggatagaatttagttattataaaaaccatggtaaaattcaaaggctatctctaagtacatcataagccatatgcaaatatcactgagaatctcaatcagcctgcagatattttaatgctttcttttggatttttctaaactgttttgtaggtatttattaaatccagaggtttagtggttgattattctgtatcatttattgtccctctttgattcacagcacaattattctttttaatcaagaatatttttacttggaaaacagctatgcctcaaggaaaatattttatgcagtaaatattaatgatcgatagactaactggaaagaattcatgtaatttctgaataccatggatgtttaatatttactagtttagttatttagccagatccacagcacaaccattctccaattaagtattactatttttaaaatataatatgctaagacatctattaaatgttggactgctcacatatctccctctccaatgtcttccaaatgacataaatgcacttttaaagagcaggtacaatggagagggtaaaatgacaagatgtcaacacagttggaagacaggagatctccagacaagtgggaaagtgaattcagactgacggatcttgagagtaagcagaaggtgggaggctaacaagtcaattagtttagatgtcacaatgacatgatgcttagaggctcttggaagttcaccagctgatgctacctgtactgagactagaaaggaacaaatgaaaagcttccagaatctgacacttatcctttttccacagtccataatgttaagtaagcaaaatttctttgcctaccctcaggactatattcagagcagagggaccttctctaaacaatagcttaatccagccatggatcatgcaatacagacatagttcaatacagaaatgaagcataatacaacatggaaattaggaatatctttatatataaaagaacaattcctgcaatcttttttagatagattcccagaattcaaagacagctctaattgtaccatagctcaggcagatgtgtgtttcctctagtcacaggtcaaagcagccattgggaaccaagaggcatattaacaccatgctatccatggataattcacagcgctaatagatggtaggtcatatggaaatacacagtgcttccaatgagtgcttcaaacacattattttacaacatggaacttgccattactagaagattctgaatgaaatgaatacagatctcaattaataaaaaataagaaaaaatgattgtgcaaaggatcacttaaagaaaacagaaactatggataacatcatctgaaataaaccaatagagaatgaatgatgtcaagaagtagctactataataatattaaaatcaattcataatctgtgattaaaacctgaaaatacaaggttgccatttttattatgttgatgctacctatgcaagagcatgggagatcttttgattttctggtttctttatatatggtcccccagagaaggggaaagggacaaaatctcctgagcaaattaggagcatgagggaaggggagagggagctagaagaatgagagggggagaaaaggagaagtgaggaggacataaaggagcaggaaggttgtgtagggagaaaatagagagagcaaaataagagataccatcagagagagagcaaatataggttgaaagagaaatcaggcatgaggtaaatgtccagagatctacaaggatgacaccaactaactatctaagcaacagtggagaggctaccttaaatgccctcccctgataatgagattgataactaacttacatgccatcctagagccttcatctatcagctgatggaagtagaagcagacacccacactaaacactgaactgaactggaatccagttgcagagaaggaggagtgatgagcaaagtggacaagaccagactggtgaaaccaacataaacagctgacctgaacaagggagagctcttggtccccaggttgatcactgggaaactagcatggaattaatccagagcccatgaatgtgggtgtcagtgaagaggcctcagaaatctatggtgcctcttatagtagatcagtatgtatcccaaacatagaaatgggctttgggagcccatttcacatagagggatactccctcagcctagacacatgggggaaggcctaggccctatcccacaggttatgacagactctgaaaaaaccccattgaagaccttactctccctggggagcagaaatggtatgggataggtagggtgctagtggaggccaggggatgatagggggtcagtgggggacaggggaggaggggagggagaaggaactgggattgacaggtaaaataagcttgtttctgatttaaaatttaaaaatggaggggaaaacccctgaaaatatgaaaatgaaaatagtagcaaatctggatgaagaatccaaaatctacagagataaaatatatgaaaatgcaggatatgaaaatatgacatcagaataaaacaactacagaaaaatgttggaaaacataacttttcaaaactataaatgacaattttctccaaattataaagtagaaattcttaaacaagatatttagaccagtacttcatcctccaaatgtcacacatggcacgctcatgtcacactctctgaaagtcatcaaagaatgtggtaaatgtcaaaaaaaatggtgtgtgtgggtatcttctaaggtagaactcagcctgtccccattctgccatgcaacccagctttggacaaacaacattacaaatcaaaacaaatgaaagaaccattttcatataaatattctttcataggaagattgttcctaaagcaggtgttcaacacaataaatgagaaaaaaaggattaatagaaaatagagcccaatgaaggacagttttcacataggaaaaagtaaaaaccaataaacaaatgaaatccaagaacaacaatggaagggcatcacatcctgagcaggctctcagatctgtgggatggacagagggaaaactgtgcaggaggactgagcagaggaggaaagggtgggtgcaagtcaatgggtgtggcagcggaggaggggagggagagggacctgagattgacatgtaaaataattttctttctaataaaaaaaaaaaaaacagaagtggagctgaaggatcagcagctaagtcaactatagaaaaagtttctaagtcaagtgttgacaaatacattatggttacattagagtaagaacgtgaatgtttcaaaactcacaaatgatgagattttactgtttcagatgttattagatactttagtgagtaacaatagaaaaattacaaaaaataaggcaagggttaagaaaatgagaaaagtagaaacttgatggaaggttggaaattcctttgacttgtaaagggaaatattgttttttcagacttagcaccaactagtatgatgaattgcatttattgtacactcatgttagtagatctttggactgcaattagttagaatgtttgtttgattgtgttgttttttactagtggaattgctttacgttttctccccctataacttgatgttagttaaagccttcgtaaactgtctaaatcatgtttatatatgtcttttgtatccttaatctctccaagacttttttcatgaaggggtgttggatgtggtcaaaggccttttaagcatctaatgaaatgatcagttcatttataaggtgaattatattgactgattttcgtatactgagccaagcctacacatctgggatgaagcctacttgatcatagtggaaaatattttaatgtgttcttggatttggtttacaagtattttatgaaatatttttgcatctaacttcgtggaggaatctggtctgtaattctctttcttgattgttatctcaaagaaaacctagtgcaaaaatagtagttgctagcagtctttaaagcatgtggtctcgctcagctgaataatctttgggttggaaaagaatacattgaaaattcttcaaaacaatatttgtcacttgtttaaaaagtctccagtatacttgagagttcaacatatgaagctatggtcttattactaataaccacagaatgtgcattattatgatttgttttgctataatatcgtatcttctgttatttataattatctacatatctgtgtgatgtaaaatattgaatatgtgccttagtttcatgttatgatggtaaaaatactctctttcaaatcagtaagacttaagaatgaatctgatagagaatttactgttttgaagcatatgattaatgataaattaggacattaatcccagccatagaataacatcagaatattgtgtgcttctctttacctttaagtttatttagttaacattgtttcatttgaaaaatttttccatatttataatggacttcgaatttcttatgtatttaatattgtatatagcatccactaatggaaaattaaggcattttaaaatttgattaatttaaaacacaggcttctattctacaacattactagcaatgttgatttcctatgtaaagtgcctagtcatacaatgaggacaccctgtaggtagtatctgaaaaggaccacagtgaataaagaaattattcatgtgtgttgcagtaagagcagaaactggggcttaaaaggaagacaaagggttaatggcacttaaaaggaagataaagggttttagagcactgaggagaatgaatacaagtgcttagggttgggtatgaaagaaccaagctagatgaataaggggacagacagggctctgagcctgtgacagcaggctaacttgccctcctaagtctttcaggaacatatgcaaagatctagtgtcctttagtgtagctttgcttctaatgcagctattctgggagactaaggctagatattctcaacaggcatcctcccaagagaccactctcatcatcccatagaaaaggaaccaaataagtggaaaccaagaaacaatgcattcatatctccatggaggtgatagagttaactctctctcatcagagagaggggtagtcatgccaatgtggaaacaaatgcagcctagttgcattaatggcactagagaacctgaaagtagctcagtggccagagtgactagtgggctagccattgtcagcaactatcaaacctcaagtttagatagagtgggacttcaaacacacctcactgggtgagcagcacataatcagggcacagccacatccatggttgggacaattgggcatacataaggcatgtggccctccactggctaggtctatgacaccccaaagaatttatcagtcttaacagagattgcctcagcttaacaaatcttggacacttcgcttacacccatgacagtcctggtttcttacttcactgtcttgagacaatgagcttagagccagtgttccatttgacctttggtgacaattgaatgcctagcacccaaggaccataggtcaagcacaatttcccccaaaatggttccattttactaaaaaaatcctgcaaaaatatgatttatactgataattcatgaataattaaaatattttatcctcaattttctttcaatcaacttctttaagaaaataattacatctcatattttcattgtcattgtttaaagaatttattgttccactgaattatatttgattgatgtctttataatgtccataggtgtggattccattttccacatgaagttgcaactgttaatttgtaaattgaaagttttctggattagccaaaccaagatgacacaaaacctgatagctattaaaagtaaatacatgtgggactcagtatggtttcacaaccagtacattggaaatagcttacattctcctattctggggagcatactgtaaatgaaatagcatttgaaaatggattgtaggtttactaaagaccatggttattagtataatgatttagaaaggatcatggcttttttgaacggatatgtcttttgggtattaatgtcctataagcagaaaaatgtccacacccacctcaggacactttttttttattgtaaaagcataaggtctttgtaagcaaagcatatttcaaataaccacggaaagggttctgcaatatattttctgtctctattggaaagtttcagcttacaacacacacacctctaaatccatctggtattacctccctcccacataaaaggcaattgtttgctttgctttgccagccctcaggttgcaaagcctgcttgtgcatgccttccttctgatggcttgctttatttcttcacaggcactgatcattcagggatcaaatctgtcagctaacaatttgccattaaacattctgtcaatagattgttctttttatagcttgttacattttaaaatgtgattgagctaattaaacacaactgtgaaattaagcagaaatttaattaacattcttagatggtttggggaaggacatattatcgccaaaaatgtacttgaaataaatcaaaccacacctaatgcattgacctaaggcctcagtgttactgtctggaaaatatgtttagtttttatatattttattgtttttaaatatttgtcacaaaatgctaaggtatacacagccaaatcataggctgcaaggatgtaaattgtttttatcaggttcggagaatgttgaataatacgtaaattcttttgttgaaaatatttgttcctctcttgttagaagcagacttctggtttggatttttttaataattcaaaaattgttagtagagtaaatacaaacataatgtatttgctcattgtaaatacaaatatattgtacaactcatctaatgtaaagataatgtaattaaaacagaagaaaaataaaggaaaacatattagagacatattagaaatttaagtgttgcaggccgtttcctaagaccagggagctggatctgttgaagtgttcttctgcattaaaacacagttggtcctgatgtggtactgccacctttgaggattccctagctgatgccatgttagttagtggttttgtgtgctccagttctctttgagctgttgttttaatcactgagcacagtatggcacattcttcttcagcagtattgctaattcatgtttgtgtcaagtttagataattcatactaactaggttaatcataaagtctttgggtatttattttatgattttccttgttagactagtagccataaacagaattttaaagtataaagtatgataaatactttgttaaactatgtgcatatcaaaatacgacatcaaatgatacccaacaaatacacatttctttcagtcattaaactttttcaagtcattatatcttttatttccaactttttaaatttgaatgagaaacaggattgttttacatgacaatcccagttcccttctcccactcatccttccctacctccctccaactaaaaccttatctgtcacatatcttttttgctccccctggatggtgaggccttccatagggtgccataagagtctttcatatcctttgggatagggcctaggaacacccccatgtgtcttggctcagggaatattcctctatatggaatgggctcccaaagtccacacctatgctagggataaataccgggcttctacaggaggtcccatagatttctgtggtttcctcacagaaatccatgttcctgtggtctggatcagccccatgctattattccagagatcagactggggagcaagagttcccccatgttcaggtcagctgtttctgtgtgtttcaccagcctggtctggacctctgtgctcttcactggtccttctctgcatctgggttcaggttcagttctgtgattagttatgggtgtctgcttctactttcaccagctgcttgatgaaggcatataagtcagtcatcaatctcataatcaggggagggcatttaaggtagcctctcctccgttgctgagatagttagctggtgtcatctttgtagatctccagacatttccctagtgcctgatttctctgtaaaccaaaaatgtctccctctattatgatatctccatgcttgttatcatgtattcttcccctgactcatactttctgctctctcatatcctcggcaaccctcgtcttctccccttttcattctcctagctccctccctcctcttcccatgctcccaatttgctcagaaggtcttggacctctccccttctccaggggaccatgtatgtctctcttagggacctccttgtttattagcttctttggcagtgtggattgtaggctggtaatccttactctatttctaaaatccacatatgagtgagtacataccatgtttgtctttttgcaattgggttacctctctcagaatggtttcttctagatccatccattttcctgcaaatttcaaggttccattgtttattttctgctgagtagtactccattgtgtaaatgtaccacattttctctatccattctctcggttgaggggcttccagtttctggctattacaaatattgctgctatgaacattgttgaacatatgcccttgttgtatgaatgtgcttcttttgggtatgtgcctaagagtggaattgctggatattgtggtagactgattcctaccacacggaggagtcaccatactgatttccaaagtggctgtacaagttggcactcccaccagcagtggagaactgttcccctttctccacatcttctccaacatgaactgtcattggtggttttgattttggccattctgacaggagtaagatgatatctcagagttgttttgatttgcatttccctgatggctaaggatgttgaacactttctgatgtgtctttcagccattttagattcctctattgagaattgtctatttagttctgtaccccactttttaatggggttgtttggtgtttgggggactagcttcttgagttctttgtatattttggagatcagccctctgtcagatgtggcgttggtgaatatcttttcccagtctgtgggctgctgttttgtcttgctgactgtgtcctttgctttacagaagcttctcagtttcaggaggtcccatttatcaattgttgacctcagtgtctgtgtggacattacatctattataacaaattatttcatatattaaaaattctaatgagtatattcataaatggcaacttgtctgctggttttgcatttcccagtgctttgctgatctgtccaaagtagaaaccctaaccctaaccctaacccctgaattaaaaggcagtgaatggaatgctatcattacactgaattatatagaacagttgaacttaaataaatgtttaaagttgctattccaagttaattttcaatttgatttaagatattttcatacaagcgatacctttagtcatttggatatgcaaatctggaaggttatgaatgaacccttggaaggcggatacaaatgagttccagnnnnnnnnnnnnnnnnnnnnnnnnnnnnnnnnnnnnnnnnnnnnnnnnnnnnnnnnnnnnnnnnttgaagacatctaatataaacagaaacacacacagagcaataaaatccgggtagaaatgaataaaatttatggtccatgtttaacctcatatttaaaaataaaattctaaatcttgtagcttttattattttacatttttaattgaacaattacctgaacaatatataattctgtatatgaagaaatatttcaattctgaagttattttggtcaaattattatatattttatataatttatatattatatgttactagaatatattcttataatattatattttcatattttaaatatgtaataataacaaactatatagatcccacatctttgcacaaaattctgacccagcatatatctccacacagacaattatattttggaaataaacagaccaatatcagagaaaaccctcaagaagtacatgaatattaatgaacacactgtaacagtcattggatagagagagaagcagacactacagagaatcattaggacaatcttcaggttaacacacttaagaggtaataaaaataatttaagaaggtgcagaaagcttgaaatggatgaaaccatgttaagttatatataaatagaatgatagtaccccaaattctgaattaaaatggataaatttgcaatctgaaaatgtaaaacaacagattacaaaaactattactaaaataaaaagaatacaatatatacaaaagctagagtgttttatacttaataagaatatcaaggcaactagaaaaatacagcattggaaaaaagtaaaaagttggagagaaaaacacaattgtttttttgtgatcagtgatgctgacaactacattccacccatgttatctccagagagactaagataataatttctaaactttgtaataaagaagtatactaaaagcttcccttgggatactacaaggggtgggaggtaactcaaggcattggacttgattcccattgtatgtgaggggacttctttcttacataaaagaagaaacaagtgtttcattctaatattttaatgttatctatatggaaagtaaaacattggtagatcaagatatctctcccttttcgattctcccacatttatatctatgtgttatatctttttttatatctatgtgttaaccgtttggatgggtaacctacgaggagctattcccttgaaggaaaaggaaatctacttcccctagtagccatcccctccagtaacttcaagtaggagtgtagtcttttgagcccctctccaatccatattgtacatttagatgtctaaagctatgtgtgcccatatataaaatgggaattttgttctcgtgaacaggacagttttcagtggagggaatctgagagtgattctgcaaagcaggtaagaaaatgctgaggaagacatagactattagaccagatccaatcctagcagctaaaggaagcattagcctgactctgtattatcagaacaaacagcttcctctagattctagagtctacagaaagaagatggataaatgatgcacccctccaacccctgccccacagacatgaattctattgaacaaaagaaaaatacagtaccaagaattgtctcttttgtggggattttgatactcttaagtaattagaacaacctgactatctcagagctgttctccatttcagtctggtagctgtgtggtcagatataattctacattaacttaaagctgcagaaatgtcagcctatacgttggcattctgagtttaaatttcatttgtttttaagataagcaaccttttatttaaaaataagctattttaaatttggaatgattgaggctggtggtattagatgagcataccttttaatgaaagtgaattcacatgattctggaaccaatgttttccagaaagtcttcagtcaggtgagaatatccagtacaatgagctcgagaatgcactagatcatagaagccagccaggaaccacccagaaggaaggcagcatgcagtgtggaccttggcatgaactctgcagctactacagtcaggtctgctcagacctcttttttcaggagactgagccacacactaaaggctgtagagaaatgttctcttatagactcagctcaatttttaacactcttccatttcacactccatggagtctatccatagagatgcggataggatggaaattagtcatgattttctgatcaaatggcaaaagcaagaatacaattatcccttttcccatatgctaaatttccttggagaggatgttcaattgtccagcaagtagggtggaagtgaatcaatgccagggaactaaataacctatcagtatttctctgacacactattattacataaatattaggctctatacttccttatatccatccatttttactttatctttctccatctcttctcacctctctctatctttttatttctagagataccctaaatctgaatttacaattaaacctttgtgactatttccaaataagcaagatttctaaataccaaacaacagtcaatggtacctatgccattaagatgtgattaaaatatgtactaccgagtttacagttactaagacagggtattattttttactttatttttacattttattatacatattatgttttaaaaatgcatgtaagatcacaaaatacttaactcaaaaattaacaaagaagaatttgactaatttactaatttttttatattataaagaatgtagctgattttatttatattttacttacatctcaaggttaattttcttcacttttggtaacagaatccaaaacaaaacctaattctcttgtgtatgaaatcttatcttcacaattagctgcactctgagctacttgcaaattttctgtgacctatgttcttaaaggacatttatatctccattgttaaaatgaattgatttaaaagtaattttaacttacattttctatgaaactgccaggcatgaataaaggctaattgcattggattgttaatagctgactcaaaaaaccccaggctcctacacaagctttgagaaattggtggagtccactttgcccaagtgtttgagtaaacaaaatccactgatcaaataataaaaagcactttttttgaatccatataaatattccaaagacaataatcttgaatgcaatatgaattattggacctgtgtcagctaatttggcatttctaattgtaaataatgttcttgtatgacattaatttctcattattggtcttacaaacaagcccggaagcttaaataaatgtgcttctttactgctcactgggctcagcctcactggaatcaaatcaaggtgtctgtccttgaggcttgtgtttctttctagggattcaatgaattaatacccttgctttctcttcttctagtggccatctatgttcaatttcatgccccattccagcatgaggaattctctgtgcctttcttctgggtctacatcttcctctagatagctgtctttctgtttcctactctcatttttggatgtcaaactgaatccatcagatctatcataataccagcaataggcagtgattggcaaaccaaactccatctacaatgttgatgctctttgtatatatgtgtaggaaatgtattcccttgtttttttttacagttaggatatatgctttgcctataacactaacttacattttcatttgataattagatttttgattttggacaaaagggatatgattctaaggttaagaagcaagagaactatgaggaaggacgttgcttctgggatcattctaggttcaggaactccattcctcctgcactgtcattagcaccatgcacagtgaacagctgtggtgcccgtggaaggcaattcttttactggttgtccctgctgggatctcatgttgacttggattttcaggtttgcttctgctagctgagcaggctttcttacctactctgttcatgaggcagctggaactaattgtcatcatagcacacacacacagttacagcactcattaaaaggtctgggtgaaacttactggtagaatccttacttagcaagcacaagattgctgtgggcttgattttcagcatcaatgaactcaaacaaaatatcagaaaagccaaaaatgatggacttacaactctcattttttctcccaaagagggatgtaacagcaatgtctctgaagccttgctcattgataactctgtattaaagataaatgagtccaatgtgtacttcatatatgttgatcttacaaaggttagttcacaaaaacggggttacacagcacaatatacccgagaaagtttcctaaatgtggatggtagttacaatactcaactcagagcttccatgacaatatgttactgtagacagttctggccctgttatggagaagtgtgtctgtcttcagactgtgaatttttagccacagcagaatgaaatatgcccagtcactggaaggaacagggaagcaacaagaagaatgtagggtgatatctgtatcatgatgacatggataaagctgacagtcatggtcatactggttttatttattttgggttatcatctatgcttcttaagtttgacttttaactcaaaccttcagccaaaatttaaggtggatcaagttgtaactcaccccttctcatccatgtgtacagtgtttccaacataactctatagcctgtctagtgacaatgattatccccacctcaaggtgtgcagcaaatatcaggaaacaccttttttcagagaaagcttgagataggatgttgtgtgatccaagagcccattactgaaatgatacagtgtgatttctgcctgtttgggggtgtttaggctgaacagtcaatcttaaaagtctaaaagactgaaaacacttggagtgatgcttatcaccaagctggacacaaacccagactggataaaatcaccttattagtcactcatttatagctgacttgaacacgagaagataggaggtgcacctattgctgtagtaagccatgggttctaccaaccaccagaaataaatgtagaggtcttacataattttctagctatatttttctttcataatttcactttgacggaaattctaaatataaatgactgtttgtaccatgttaaatataatacaataataaaaatatttacactgtataaagatgtgtcactgtgattagtttactaaagaactgaatggcattagcttgggaagaagagattaggtggaaatacttggaacagagagagctctgggaagaagaaaggaggaattactatctggatgcagaggattcagaatgagtaaaatagagaagaagtaatgagtgtgtggaaggatgtaactttacaaatatgggttaattaagttataagagcttgttagaaacaagccttagctaaggctaaactgtcataattaagaataaatctttgtgggattttgttttctgtgtgtgtgtgtgtgtgtgtgtgtgagagagagagagagagagagagagagagagagagagagagagctggcagcccaaagaaaaatctgcacacacacacacacacacacacacacacacacacacacacagtaggattgaacttgtgctgagttttgtgtggcagtcagagaagaactgtctccacagattagatctatggttaggatgtatttctcttcacttactaactagaatccatatatagaattccctgaagaaaactgtgctgttgtgtttcctgttcaggctccataaccaatattttggatctaggatctcacaaaaattatgtatgaaaggaaatgcagcccttttggtactcctgactgcatcatacctctccttagaatcctcaccaataccattcttagcaaaatgtcaccattttctcatcctcatgttaatttatacttgtagggacatttgctgaacacaaagataccttggaagttattcagaatacaaggtggtataatttaaactgcaactcacaggacatgagcctccctttgatttattttcaaatagcaccttacaatgtcccctagaatgagttggagttggccacccttctacctcagcatcattactgcttaacttcctggagcatgctgcctgtctggcttagtcacactattcttatcttttcatatcctttagcaacagttccagcaaaacaagactatcaactggagggacacacacttattttctcaacaagaaaatactgatatcctcagtgggggattagttaaaaaataaaatagtctctatcatcgcttcctctctgttgaaagattgcatttttctttagcacgcaaataattgtaactttatatttgtaaagcttttaaaaaccgatacttctttttcaatgttttgctcattttgtttcttctttagatatatcagtcattgctactacagcaacagaacagtgttaagcatgagccaagaatttataactctgttacttaaaagttttgctcctcagagcttgcctgtaatagtgctcttattttgctatgctctttgggtcacactactgaaaacattctgaaacccaccccaccctctctctccttttattttactgaaaaggtcaaactcatcacagtagtcaaaattgcccaagtacttaacctgataaggtcagggaccttctctgtgaatgcacttcaagtgactggattgcttacaattctgcatctaccgccaatgaagggtagagtggatgcttccaatttccattcatccaggggaattatgaagttaaaaacaaagtaaatgattgcattagtgcaagacagtcagggaacaaatgaatgcataaggactgcagggtcctgagaagaccttcttccttctgtctatggttacatgcatgtaaagaaaaacaaaggctgccatggggctgtttaggtgctcacctgaccttccatttcaggatgtttctgacatggaaattagaaagttgatgcagaagctgcagtgccagttttcaccagctggttattttatttctctcatacaatacattaacagttacctccactttagaataagaaaaggtattgatgaagtgagtggtatttgtctctgtgctatccagtcgtcaagtggtagactcgggaaattgattcatacaccgaactcaaggtccttttcattctaaagaacaagaaggacaagcttcaatgtgaccatgacagaaaaacaagtgggcttttaaaagagggaggaatttgtagttcagtatttgcagctatatagtaaaaaatatcgctgttgatggataatttacatatgcatctgcatgtgtatttgcatgcgtatatctgaatgtgtatttatgtcttagtatttatacaaatatatgtgtttatgcatgtattcgtgtctatatatgtgcatgtgtatgtgtgcaactcaatatgtttatttatatgtgtttatatccatcgatttgcatgcatatgtatagatgtgtgtatatgtatgcatgcaagtatatagttgtgcatgtgcaattatatatttgtgtttatagtgtgtatgctccctacatatgaaaaacaatggtgtacaaagaaaattagaaaatatcacatttaaatttttatcacattaattgttattgagtacatacataaaaccataagtaagttgaattttgacaagtcgatattctttatcaaattgtatgctaatatatggttggtgggagaaaatgaatttcaatagttatcttaagaatttcagctctttgggatctcttgacctgaggactgcaggcaggtcgactagtcctaggtggaacaagccatccagagtctgctgacattgtggtgctactcctgcctccagccacaaggagagggagtgtctcagacctgcttgcacccagcttgaaacccatcacagtattggacctgtttgaacccactggaagagaaccttggaccctataaagagattgatgactaccttaaacaccatcctagagcctttatccagaagctgatggaaacagaaggagacacacacagcaaaacactgagctgaactcctggaatccagttgcagagagggaggaatgatgagcaaaggagtcaagaccaggctggagaaacccacagaaacagctgacctaaacaagggggagttcgtggaacccagcataggactgacccagattcttctctgaacctgggtgtcagttaggactgggcagtctatggggcctctggtaatggatcaatatttatccctagtacaggaatggactttgggagcccactccacatagagtctagattcaagtggggggcctagaccctgttacaaatgatgtgacagacactgatgatccccatggaagcagaaaggggattagatagggggttgcttgggggcaggggaggaagggagggagacagaactgggaaggcatgtaaaagaggattatttataatttacataagaaaaagaattgcacacataatttatgaaatatttgttttgtgtgcatatatgccttaagagctatttaaatgtctgcttttcatgtgttgagacagaaatataatctaaacgtgatcaaaaagtgttggggatcatgctcacactctttttctgagatatattaacaatttgtgacctggtaaatgcatattcaattttgaaatatgaaacaattgcctttctataaacattgtgttaatagaggcacttgtcacattcccacagttttcacactatataactactaagtattttttctttcctttttttctaccagatttgtaacctaggctaaacttggactccagagggagaacctggattcctgatctaaatgcattgacttctcaaattctatgtttgtgccagcttttgtgttgtaatgctaggaattgaaccaagggccttgtgaatgcttggcaagtactctatttactgagctacatacccagtgcctaaaccatatctcttctatactgcaatttaaatttaatcccctcctatctgttgtttctgtgacaatacaaacaaggcagaagtaaataaaagaatcatgaatgcacgagcctttagtgaagtcataatatattgtaagcagctttgaattctagtttgtttgaatggccataaacccataagtaaactgtcaatatgaaccaacatttcatcaagatgaattggtaatagtaatggtaaagggaagtatttcaatattactagttaggaaataatgacatataattattgatattcaatttgttggaaataaaagaaaatctctctcttttcaggaacttaatatgtaagacatcttaaatgtattggtaaaattgtgaatatttattgctgcctgggtggtcagcccccaagaaccacagggttcaaagggaaatctatagcattggtgcttactagacttttctatctagttagtgaaattcactcacactctctcttgatggtttccttctttactttctattctttctctagttctttctactttttttcataaagcttatgtaacccaacaaaatttttcaggcaatataggattttcaatgtgctcctcccctgacacggacactggcaaataatcatagatttagatttatggtcaaacatggatgaaacacctgtctaagaacccatcctatgggaaagggacatgcagataagacctttaatattcaggttctttagtttttgttggttttcatgcaaaccattaaatgagagcactgtgaccatacagtaacaaacatgagtcattcagacactacattgggccaaaattcatataacttacatagttttgacttctcctggagccaccaccagtgaggaagagtggggtggagttagattaggggagaaaaaaggttgtgggaggaaggatgggagggagaatagtggttgcagtgtaaaatgagatttaagaaaataaattacaaaaaagaaattctatgtgaaataagtctaaatttacacatcaccagatagctgtataacaataactgtacatctagagatgttttccttttgactacatgctagaagttatggtctggagagatagatcagtggttaagaccctggactggtcctagaacccatttattggttcacaaatgcctgtaactccagttccaggcgatacacactcttttggttaccagggacatttcactcatgatgcacataatacatgtaggtaaacacttctacatataaaattttaaatattaaccttaaaaagttattgagtatatctcattatgtttttcagacttcttgctatagcatatacttttcagctatttataaacgtatgttttctatcttagcaaactgaactttaataataatttaaaaaatctcttactatactgtgaattctgggggtggctttgtatttatggttttactgtcagtgatatactacaaaatcattctcgtttatagtattacataaaagcctctgcaaattttcactggtaactcacaatttaattattgtgtttttaatgatcattttttacattttgtattctaatgctttgtcatcataaactctcctgctattatcacctgctattattggaattcacttatttcgggtcacctatcaagttattgtccttgtttcataatttcaatttcagtcgaaaattttatgtgtgcttgggtgatttctttgagttttttctaccttgcaaattcctcatttcttccctagacttctgtggaatatttcttacatgttaatttaataaaatattctggatttaattattcttctaactgcatgcacactttaaaaattgtggaatgacaacatggctcagtgaattatggcacctgctggccggacaacctgaattctaccaccagagcctacacagtaggagagaaccaagtcttataagttgtctcttgacctccacaagccttctattatgtcaacatacaaaataaaatgaaaaatgcacatttttggcaagtttatagttcactactttattaagtattatttgaatttttattgattttaaaacactttgattgtaatccccacccccaaatggcctttattcttcacttttataggatatcagtgctttgaccttttttccaaagcatttatgaaaagttttaatggtgaacgtatcctcagcatatcaataattctgtgtcacagatgccaatatagttcctttgtgaaggtgtttgcagtttcattatctttggtattgaatggtgataggtttttgtaacacacacacagacacacacacacagacacacagacacacagacacacacacacacacacacacacacacacacacacacacacacacacacacaaaagatatagagaaagatattggggttcaagctttaagttgaagttctaccaaactgaaatgacaatcctgtttccatgaacctcagaggcaaaagctctatgttcttatctcttcctgccttatattcttttctccacctagccatatcactcatgtctccaccgccctagtgctgggattaaaggcatgaactctgttacacttcactcttgtttagtccagggcagccttaaactcagagagatccatatgcctgtcttctgagtcctaggattaaaggtatgtgccaccactgcctggctctatggcttgctagtatggctgctgagattaatgttttgtatcaccattacctgatctctatgactttgtctagctttgcattctgaaccctcaggcaagcttcaataaaccataaataatatatcaccataggctcggtctttcacattgtgagggaaatacatatgttcaggaaaagcctggatttccaattttatccatgactctttttatcagagttcaggtgatggtctcaatggcagggtgcattctcaaatgatcagtagtatctcttctgctgtggcatttctgctctcatgtttagacattggtcatcatttctaaactccctatcacgaagatcaggcttagcttcctggttggcaaggactatgtcctttcctaatgtcactacacaatacacatgatctacaaccaaaaatcatacaatgtataatccccattactactttggtccttggttttctgctctttttgttcctcttgctttgaaactgggtctcacatagcatagaatgattctttggaacatttggtttcagcctctcacatggaaagactgatgtcatgtgccctgcttagctttatgcttattttctgctttgatttctgtcaatctagctctctcatctttcctttgattgtatttgcttatgttctccctttacttcatagtagaaatttaatttccatcccaattttatggtcatattggagacagagcccctagtattgattccagtcttactaatgagaaacatgaacttcataaaaaagtccctatattcaggaatcccatagcaaaagttttcaaactggttattttagaattaaactttgctcacacatacatactgtctgccctcctccaaatacaggcacataattatacactgatagaaactaaacaaatgaaaaaagaaaaattgtaatatatacctagcagggtatatattcatgtctatataattagtttattttgctcaagtgctacacatgggttttatgtaatacaaaagtgatataaatgaatagacaaaaaataaattaaaataaataagtgcctacaacatacttgcatggtcatttaaagagggtttagcatttatattttaccatatgaacatttgtttatgacacaggcaaattaatattattgttaactgaaatcacaagaaaatataccaataaatactaatttgccattctgttttcagtagttataccaaacaaggaactttctttaatataataaaatgctaccatatggtacacttatgtaagaccccccttcaacttcacaaacttagcctcaccacttatttagtacaaaattatatactgcttttaatatatgtctatattaattcataaaaagattaaaagatacttattttaaaatttcaaaatataattgtatcagagttaataatcttaaaatccattgtcattatagtaattaaatttttttccattgacagttatgaggatgttgtataatttatatgcatttgtgaaggtttcaaaactctttctattcaaacttttatagataaaagagtactgaatgttatcttaattttcttaaataagttggcttttcttgtagtcaaattatatgctccgtactggaaattgttcaatgtacaattgatgacttgttcttttgctgttaggtggaatgttatacactatttgttggaattattttacacaaattcttaagtctaatgtttatttatatgttatccttccatttccgctagtaacccattttgaactcttccaaaatttgcataaacctattttaaaatacaaactttaccttgatcctaaagtcagaaatgatagtagtacatatatacatatgtcaatagtcttgatgaacacagatgaagaaaaatactcaacaacctaaaaagcatcatttccaaggataacacaacataagtaagtcacatgaaacatagaaaaatctagaatatgaagtaatgcattgatagagttaaggacacaaccatgaattcatctcattagatgcagaagtgtcattagatgaaattgattgttttacatgatgaaaaccctctacaaatttggtttagaagcatggtttcatgatgaccaggacatgagaacaatggatctctactcccatactcattggtaagaagtagaaagctttcctactgagatctacaagacaaggatgagtgtgcccaccataacaatgtagcaccagatgccatgatgcggaaatcagcaacacaaggaaaaaactggtttccaattagtaacaagaaaacaaattgtttgggacagcaaggcttgctatgaagaaattccttaacacttactttatcaaaacctgtcagaactaatggaacaattcaataatattgtaggatataaaattaaggcaaaactgcatgcatatatatcaagctcatttacaaaagaccagataaaaaacacttcaggatagatttgtgaccagtatactaatagcaatgacagagataagaagcctcaagaaaggctaagtaattgtggacaaacaagcaaatcccatcatgagactttgaagaaaactaaaaatctctagaaattttaaaagtaacacaagaatatatggtggaaaagctttttgacattgatcttagtgattaataatttggctatgaacccaccgataaaggcaaacatggaaaaaatagacaaatggaataacaccaacctacaaagttttgtggaactctgagactgttagtaaaattaatcttgaattagctgataaaaattagccatagaaattttagataatccaggaaatgatagggaggggcttagcaagatttgcatgccatatatgtggatactacttagacttaagtaggaagagaattcacatcttagtagtaatgcatggaggacattcagttcattgaaataagcaaacaattagtgacacctacaacagttcacttacatgaaacccaaaaaaatgccaacacatagaaataaagaggagaacattcaacatacagtgtttggggttagagaagtttggtaacacacttgctaaattatttaaaaattcaattagctataaaagaaataacatgtagagatccattatacaacagaaggagaaaagttgcctagtgaaagtgtatactcagcaccattactgtagacagagttcttaccaaaaaggtggtgagaacctctatgttaccaaaataagatacatgtgggaaagaacacaatgaagccatttcatagagtatgcagttttcaacactacattttttaaaagaaaaggatagatattttaaaattacaaacagaatcatcatgataaatcattaatatcaggatcacatctatggaatcattgatatccataaaattttcaaagaaaattgttcgggaactgaaacaattaaatgaaggataacgcagaatgtgatgcttctgagaaagaaagttttgcactctcacagagaggttgaaagagcgtgcatgccatcctcatgccttgcnnnnnnnnnncctcatgtcttgctcctgtgtgacagagcatgcaagttaacaaattgctgtgcttgcagaactgataagaagggcattccagacacatgggggacactggaacaccagggggtctaaccatctccatcagaatcagagacccattcacccttcaatcagcagcctcatttttggcatgtaatacacacacacacacacacacacacacacacacacacacacacacacacacacacacacacacacacacacggaccacggactcacacatatattcacacacacatactactcatttcaaatatgaagtaatgtgtattcacaatgtttcaatcaagtataattaacattaataaaagcatagagtcaacccatttgttcatcagaggcctggctggaaaaattgcatatatttaaaacaatatagaatgatagcaagatctagaacacatgagtgctctgatgggaaaggaaattgaggcatgaaaacctctgttttgtgtggaagaaccaggggtaacagaccacttccatatgtggctcataatggaataaattaataaagggaaacgtataatgaagtacacctcattggatatgctggtaggaatttaagtggcaaattagattttatagttgtgcaattaactctaagaaaataatctatctttcccttctcttttttaacagtatgagacattgtctacattgataggagttcctgtcttttgatgtattaataaatctatgctttcatgaattattttaaaagtaatcccatttcccacttattttatctcccctggttatcaacgtaagacaaacacatcctttgaggtcccgaccttcaactaacattgatgtttatatcatatgccctaacatccagacacagaaatgttccttttggagttaacacattcacagctttaacatgtattttagttgatgagagtaggaaagattccattcaaatttcacaatgatcttaattaagggcataggagaagagctttttcttgaatttcactcactgtggtcttgtgcagaaaggcaatcttgtatgaggaaaatttgaatattaccctcgagttcaaatggtttaagccattttattattattattattattattattattattattaataataataattctacaaaattagtcccctttctaagtaatttacacaactgtcattggctcaccttatggagatcccatcttcaccatcacatttctgtttgagggctttatcagctccctggtcagtaattaataagcatttgttctaggaatgagctaaggaatctcaggttgttggttcctcctcatcagtgtgactttgttagtctcgcccacctcaccccttcccttgtccaacccctccctattgaaggggtcttttttaaaataccattgcactattttgtgtctccaagtttggggcaacctaggttttatatttacacttatttccttccttagtcttatgtattctttaggtaagtgtacaagtgtctaatttctataccatctttgtttcagagctgtctatattgcataatactgtttgattactatagctatagactttgaatcagaatttgaaactcaaatttattgagtctcttatccgtgagcttgttgcaaatataattttttctttattatactaagtacagtgtcttctcaccactgttaattttttttaaactcttgtatttgttatggggagttagcattgtaggtgaagtgcttactttaccagtgtaaggacgtatattaaaatatacaggactatgtaaagctggccacaatagcccatgccttcatctctgccttctcgtggaagataaggggtagagaccaaagaataaccagatgctcctgagcttgctagcttggtacaagcagaaaactacaacaaataaagtaagcaaataaatgaaaaaaggcaactgaacaaacaaggaagaaggtaggatttcgggtgtttatgaacgtcccagcacagtagcaggaattgaatatgactcccctggaagagcagcaagaacacttaatagttgacattcaatgagcctggaaaatgctcttagtttttaattaatcttaaggaatgaacacatgcatatccaacaaatagttttatattactgaaatgaaatgtgatgtgaattgtcatacaatgtcttgatgacttaatagaagaactcaccttaataaaaaataaactgaaactcactagagaataagcatgataactttggtttctaattttatttcagtcatgcttatacatttttgagggcaccagggattggaggtgctctacacaacctacaacagagaaaccatgactgaaggctctgggtacgtggcttgctatcatagtactgcacctgtaaaatactaatctgtttgagcagctgtatttttatacataatttattagtgaattgttattgaaaaagaggcgtctgtgtgagaagccactctgccagctaatccccaaaggagtctttacttagaactattactttagtgaacaaaagactcttgtatggcatgaatgtactgtacaggattcagccgtacactgttcctcttcattatcaagtcgctttatggcaataatgaaagtgcctctaactgaaatttgacactctatgtatagtatgccatttcaaatgctcactttaaaaattgtactatggaaaatattgaaaatttaatggaagaaaaatgtgctcatatttcaaaagatatgtaccctctgtctgtcaccaaatattctcactactataacctaaaggtaaagatgccttcagtaagaggtgtgctgagacacagaattttattctctgactacaggaactatagttactattatattatattcctattatattaaataacccaaacaaaattgagatgagtttgactttccaaagttgtatggatttgggtaccatctaaatttatatccaatcccatgctaaaactgcatatataatgacattggtacacaaactaccaactctataatatccagccaggatgattcagaataaaagatacagtctctacctgagtctcaaaatagaacagtgatgtggatataaagcccaatgtgactggtaccatgcaagaagcaaatgtagcgtttttatgatttagggatgtgattggatctaagcaataagacatattgtgattgttacgcttctgctacagccattagtataaagaatataactgaggtgcagaggtctgggaaacatgattgttaaattatattaactaggggatgattcagtagtcaaatgaggacaagaattcagaatccagcacccaagtccaacctctcagaactgtgtgtaattccagctacaaactcatgtaagctgtagtggcttccacattcttgtgctcatacactcacattgacatgcagacccaaactaaatttaaaagatgttatcaactttataggaatagctttagaaaattagtcgacctgcctgcaggatgtaactagaagaaaccattctgaacaaggtaacccagtcacaaaaagacaaacatggtatgtcctcactcatatgtagattttagacatggagtaacagactaccagtctacaatccatactgccagagaagcaggaccctaagagacacaaacatggtcccctggagaagcagaaaaggaaaagatctgagcaaattgggagcatggcgggaggggagagggaactaggagaatgagaaggagagaagaggaggggtgaggaagacatgatggggaagggaagttgagttgaggggagaacagaagagagcaagataagagatcatataatagagagagacattataggtttaaagagaaatcaggcactagggaaatatctggagagctacaaagatgacagcaactaacaatctaagcagcagaggagaggctatcttaaatgtcctctcctgataatgagattgatgattaattcatatgacatcatatagccttcatccaacagctggtggaagtagaagcagacacccacatctaacccttgaaaagaactggaagaaaattagtaaacctggcttcattttaatatttatttgaaacataattatcgtaatacaatagttgagagatggtagagacatacatgtgtgtaatgagttaagcaaattcatgaacacacgattgctatgtaggtccaggggcttgctttcttctgctctggcccctcattatctacacagataatgtcaaattcttcaccttatattttattggctgacacaagtttagcattaaaatatataatactccatgtgttattttctgcaccaaagcatatattacccagacatttaacaaagtatatgtaaaactaatatatctctttaagaacctgccttatctcctgatgcctgtttaataacctgacctatgagggctgtttttttctattacatttttccttctcgacaatcatgcttccatgttctcaacacccacacacaaaatgcaatcagcatcctgactcattcattccctaacactgagaattttgcataagaaaaaaaaatatttgaagaggatcatttgaaaatgattctatagagacagatgggccacaccatttggaatttacactttttctctttgaaatgtggattcatattggataatttcttctttcatttgtccagtcccccaaagataattattaagttgttctaccatgtattagaaatgatttcaactgttaacactcaagagaacttatacagtgaagggaaccaattaaataaataggagtcagatggcaatatgttcatttatagtaaacaatacatgggcagagaagatgctacttttaaagaaggtgagaaagaacaggaggaaatcttgggcactgagaagtgagatttgtccttgccctattttggattgttttacagtgggaagttatgagtggataaaatgcaggtagatagagaaaacaagtaaaagaaagaaaaaaagaaaaatgattagagtaaaagtgacaataaatcaaggttaaattctgcaaatgatgagtgatgcaactcttagataaactggaagagttgggaaatttgaacagagtgacaatctgatttaagatgactgtgattaaaatatttagggtagtgacttgtgagttagaagtgtaagatgtgagatcaatgagaaatgaatgctaaaactagagaaatagtgggacccaggcaagattgatagtagagaaagtgatgggaaataagactgtatatattgaatgtgtgtttaaggtttattgtatgtacatctgtttgtggaagcaagtgccagatgaggaggagtgatgagggcactgggtaccctggaacaggagatacacatgactgggaactaccatgtaggttctgggagccaaactgggttttcttctgctctaaagtgcagagcattatcttcagctccacagttacaatgtattttaatgtaggaaagtaacaagttgttagtgaaaacaatgtacaggaaaagaacaagtcaataatcactgtaaactttcaggaattcttagtagtcagattgcagtaagcatccctaatgttgaggaagacagtaagagatgaaaccaagaagaaaacaaaaagttgagtttaattgtgaatatgtggatacctaggttcctatcaagtgtgcaaatggtgagattatacagtaaattgaatatgcatacctatttttcatgagccatgcagcctaggctcagatcagcatatgatgacctgaccaatgggattcctggagcaaggcacctgtgaatagggattctcccttggcaaagatcaaaaggccacaggaaagcaaaatatgggcagcttgcaggctcttttctctctcattttattgttcattctttgtgtggttgtcagtcacacatgcaatacctgtaattttccctggcaattctgtttttttcaaatgttttcccttaagattcagcagggggctaatgcatctcaaatctcttgctgggattacaaactacaactcctaatcctaggaacttttctgactcaatagagacaattaggtacatatgggacacacacacacacacacacacacacacacacacacacactggtaccatgcaagaagcaaatgtagcgtttttatgatttagggatgtgattggatctaagcaataagacatattgtgattgttacgcttctgctacagccattagtataaagaatataactgaggtgcagaggtctttaaccatatctcacagttctggaaatgagagtaatgagagtaaggcatggatgggaacacagaacagggaaaagccctcaagaatacaaagaatgcttactgctggtaatacgtaatatcctgggtaccatgcatatatcatcaaaggtatgatcagatatgctctaaaaggaaaagttgtgatgcaaaatatgggatgaatagatccatctttaccattcacaggagcttgtattggggaaaaaagtatggtatagtagaatgggaaaacagtggctcatcaaattctgccttttatagaagatcaaaacatgatcctcttgtagaaaagggaaccatatgaaagcatatcttgcagacatggagaattatttgggtttgaataatgctgtctttaaagcattgtatcgatgtctgttactttttaattttataaatgcaggtagctgccagatgatgaaactgaagctagaacagaatgtgtctagcttgatatttagttaagcttgcaaaaatgctgaactctatgtctagaacaagtttatgtagggggtgggaaagtatatttggggatgcattaagggggacaatgggaatctttacactgtttatggtgcatctcttaaaaatgatatatttcttaatagtaaaaatagaaggcaataataaagctgttcatgtaagcttggtagaaaaaaactgttaaagtataaataaagattgctaaaggtacttgggaatacttgggtgcaatgcacctaagaaacatatttcttccttttcacaatgttcctctctaccccagggcctgaactctaaccgaggctagaccccaacaatcttaagaagtgacatattttggattcatttatgatattagttttatccagagacagattaaacaaatatgaggaatccaaggagattgcactgtaagactttattgttaaggaatctggaatggagccatttaaacagagagataaatactaaaaggagttgatgaaagtttgactgtcaagggtcgcttaaaccaagttgataaaacttgaaaaaaagagatattttccaataatttccacacagcttgagtatagttttgaagagtgtgccatgtgaccctgacatcatgaaacagctccagcttgcaattcttccccatcttttcctgaaatatttggaattgtttggaaagtgccattagtcctttctaaaatttaattgggctcaataaaaccttttagtttatccaatagtatagagccaaatctgactgcatgggagaggtttgggcttccaatttttataagatagaaacagcctgtgctggcaggcttccttttagtctgtggccttagctgctagagaatcacagggacctcaactatggtctgttcctacatcataaatgcctcctctgcaaaggagacctccaaacaaacaaaaaaatactttctatgtccttctaacagtaaattctaaagcctgctaagaactagatttggtctgctcatggaatggctaaagcttctttttgtgtgtctgaaccctccatatgtgctcatctttcatttgctccatgtctcctgcaaattgtgtttttttttccaatgccactgttgtttttaatagcactcccttatactgtaatgtgctataagagcataatgttcataattatgaaaaactcagattttacacacatttcttctaataactatattttaaaagagaaatttaaatttccaaatagacaccaggaaaagcacaatgatgtcattataacaaaatataacagtcaggaaattatgcaatgactagaattaatgagttaattaaatacataatttcacatgtaatggaaattaaagttactaatacaggaatggcaatggaaagattttgcaaagtatctgaatattaaattatccccatcatagtattttatgtttggaatgtaactgaacaattacacagtgctttcttttactataaaatcatctttgaatgacgaggccttaattatggacatgtggaatgtgatgttgccataaggaaagaaagagtttggtcttttacaaagactatatgtgtattttggatattctgataaattatgttcaaaaggcaaagtgaaagtgaaattcaaaaaagaatctatgtggatggagagtaatgtgtcaggcctgagaccaagaacaccttacagaaatcattacattaaaaatatgtaatcaaagaacctcataatcatatacacacagagtgagagagcagagagagagagagagagagagagagagagagagagaagagagagaaagagagaagacaggagaggacagactcattaatccttggtactactgaccttttgtttcatgcaatctttgagagtgagctctaaaatgaacctcccttgtatctcttaaatctatcaagaatttggaccttctatgtatctgttgcatttatccagaaattctaatgccaccattcaaagtgatgacaaactaatgtcaatgacaacacctgaccaaaatcaaatagtaaagggatatttgcaaataaaattccacacttgctctccattccttgacacaattgaaatattttgacatcccattttttgttgattattattattattattattattattattattaaatttaaagtaaaaacaatcttattttacatacagatcccagttccctcttcctcttgtcctctcaacccccaacaactccccatcccacaaccccattaactcctcagggaaggtgaggcctcccatgggagatcatcaaagtccgtcacatcatttggagcaggacctggaccctgtcccctgtagttaggctgaaagagtatccctctatagggaatgggctccaaaagcccattcatgcactagggataaatactagttcatctgccagaggccccatagactgccctgctccccagctgacatccaggttcaggaggcctagtgccatctcatgctggttccccagctgtgagactagggtctatgagctcccacttgctcaggtcagctgtttctgtgggttttaccagcatcatcttgacccctttggtcatcactcctccctttctacaactggattccaggaatttggatcagtgcttagctgtgaatctctgcttctgcttccatcagctactggatgaaggctctaggatggcatttaaggtactcatcaatcttattataggggaagggcatttaaggtagcctctccactattgcttagattttagttgggggtcatccttgtggattcctgggaatttccctagtgccaggtttttcattatgtccataaccgttgcctctattaaggtatcttttaccttgctctccttctttgttcttctcacaactggaccttcctgatccatcatgttcttctcccctctccccttctcacctcctctgtctcttctctcctcccctcctccccccatgcttccaatttactcagaatctcttgtccatttccccttctccaggggaaagtgtatgtctctcttaatttcctccttgtttcctagcttctctggagttttggattgtaggctggtgatcctttgctctttgtctaatatccacttatgagtgagtacatgacatgtttgtctttgattctgttttgtttttttttacatttttgtactacctatcacataacatagtaatgtagaagtattgtgtgtaattttcatattcatattaaagatatgaatgactataaagggggccttaaatgatagagtattctggaggagtttttatatattacctgtgagtcttactcctagttattttatcacactcagtattacagattttaatttgaagaagcccttaacttttgttctagaacaaatccagttgaaataatttctgtctttgtctgagaatatctttaccccttctctatttctaaaggataactttccctgacagattatttctgagtggcaaattattttctcttcattaaataaaaatcatacatctttcttccagatagagagtttttgtgagatatttttttctcaagtgaattggggcacatctatgtgttatttgttgtttttcccaacagccgtaaaaaaattcttctttattgttcccctttgagagtgttattttaagatgtttcagagtagattcacttgagttaagtctgactgttgacatttcaccctcctgtcattgaatatctgtatccttctctatgtttgaaacttttctagtattatggacttgagccacctgagcatttactgtcaatactgtacaaattttccacatgacttttcacatctgtgagtattttcagatattttctgaaatttttgcttccagagatcatttcaatagtttaaatatcttttgttcgtccactactgtttcttaaacttgataaatcatgaatttgtcagctcaaatatttctgtgtgagtttttaatattgctttcacctctttgccaaatttttatgatagaatatttagccatttctcacatttttaaagttcattgagttttctcagcaatctgtcttaagtattttttttctgtaagcttcccatcatcaattccatctggtcagtttaccttcagttaggtcatgatttgtagaaaaccccaattgctatgggatttgccatctggaaggtaaaggagtgggctttgaatcaagtcttgctagtttgattttatttgtggatgtctttctagaatttaaattggctgctcattttctggtcaaatccactatgtcaggacttgaggattccgatggctgctatttcccaatttaatcttgttggtgtgttgtcacattagtgacatggggcaattcaagtccatgactatcatccaataattatataaattaggtagaatactacagaatacagaccatgatgcattacatgaatgagaataatggaatcataactttcctctatggtgtttttacttctctattttgaagattaagtgttagtatatgcttttatattttattttacaacatcattttaaggggtggatggtgacatgcttttgcttctgcatgatgccctcacaaagactgactatgattcgtgagaaaattgggttttaaaacaggttgacttgtctgtgtgcacctgcaaaatgctctggtgacagctgccaagagcctgcagccttctttggattaaggagcaaaataaaattgaatgcacatcttcccagcctgacttaatggctaataaatcacttgtaatagaaaacaagaaatggcctgttctcttttgcagcctagaattacatactttttaatgatatcttttgctctgtctcaacttctctcaataaagaggttcattatagcctttgtagtattgagaatccactatttccaaatcagagctatacaactgagaggaaacaatcttacagataatttaaaacaactgacttacacattgtgaaactctggctgtgggggaaaatgtgatatatccaaggtcacacagctctagatttacaaaagcaagatctcatcaacctgccaaaattgtcttgtgtcaattaaatgtcatcggttcattaatcagaacttcctggtcaatggaaaaattttagataaataagaactgttgtcaagtttagtttcagatgtatcagtctctactatttagcattactatttatgtttcttcacattccattgtttgctttttcattgggttgctgcttttttcaaaagtcagaacctcttccaaaaatcaccccctccactctttaagaaactgaagctgcttgaattgttcatgcttaaatttctaacttgatgttttccactacacagaggtatggttctcagcactattccaggagcctttctttggttattgatttcccagtacctcccagaaaatgcacaacagcccacaggagttccaatatgaatcatttatttcaaatcaattcatttaagaggcatgtaaaaatattgccgctgcatgtgtttatggagtatcagtaagacacgtcttcatggagttcaccagatcttttttcttttgtatctggttttgttcatattttccaatgttctcttaattatgtagccatttctttaccaagctcacacttcactgccctcctgatgctagagcatgggaatatagagatgaataaaatatatacccttctctacaagctcaaagagttagtctgttctccctgctgttcagttgttcagtgacacttttgtatcaattccccacgttgggacacaaaccaggaatacaagtcttctgttgcaatgattacctcatccttctgctagagtgatcaccctatcactctcctgcagtgatgacctaatttttctgctccagtgatcacctcatccttcccgaaagactccattctttaagtatcagcctcaaaagaataaaattctgcggtatgactgtttggaaagctctttcaatttggggactggagagatggttcagaggttaagagcactgactgctcttccatatgtcctgagttcaattcccagcaaccacatggtggctcacaaccatccattatgagacccgttgccctcttctggtgtgcagatatacatggaagcataatgttgtatacataataaataaataaatgaataaataaaatcttttaaaaaagttctttccatttggtagtcaactgttcagggaacatcatgctgcatgagaggcaggcctcacagagcttcagttacctcaaaagaggccaccagctcgctccacattggagccatagcttttcatttggtgtcagtgctgtgttcataagaaaaggctttcagattccctataaacacctatctcaatgtggtccttatccagtaatggcttgctgatccttaaacattaatagtagaatattccaccagcttttattcaagttgccattacatttttttactgccagtctcattctatgttgtctaatattacatggaaaatataagttattttcttgtcacaaccctttacagcatagttaggactaagtctaaatgtccataaacggctgccatgcttaaaactgaaattaagcagttgacctgacctagtgatatcacagagaccatagttgtaaagctggggagccagctttggatggaaccaagccctctgaatgagggtaccagccaggaggccaaggcagtccattaacagaggagactacgcttatccctagagcacaaatagactttgggagcccattccctgtggaaggattctattgcagcccagatatggaaggaaagactggaccatctcccaaatgatgtgaaggatttgatggtccccaatggagggtgtcactatccctggggagtttgtaggggtatgaggacagcatgggaggatgggaggtcaagggaatgggggatgaatataaataagagcacttctaaaataaaaaatgtttaataagaaatattcttaaaataattttattttcaaataagaatgttgattattctaatttttaaattagattttaatttattaagtgtgcgtacatatgtatgcatgtgtcatggccttgggattgtcagtagacaattcataagattttttttccccttttcacatgtgggtaaggactgaactcaggccaccaggcttgttagaagacacttttttttggaacacctttccagctttagaattttgttttaacatttcatgttgaaaatgccccatatagctactgatatgtaatccttgttgcagtttatctgaatcaagctacattttgagattatgctacaacagaaaaaaattggaatgaaactatgctggattttgaacatttttaaagatccatatacattatgtattaatcctaaagaaaatgataaattcatagggaattctccaacagctgctacttatgtaatccaatagacaattagactcataaaagtcaacacagggcatagaaataactcattttatgagtttccataatagaaatacttaactgcagcatttatttgatgcttgcatagttatctgccagcatatgagtttgtgagatcatcatgcatatagccattgtgtccctcaaataccttagtttctaaaacttaattttaataacctgcacagcttatatttatatttggaattccagaacaaacaaccatagctgcttcataagagtctctgctcccaattagctcaggagttcctgccccttcccattcttggggtccatttatcccttagagttcttcatgtttcctagtttctttggtgaagaggattgtaggcttgtaatcctttgctctgtgtctaaaattcatatatgagtgagtatataccatgtttgtcattttgtgactgggttacctcactcaggatggtttcttctacttccatccatttgcctgcaaatttcaagaatccattgctttttattgctgagtagtactccattgtataaatgtagcacattttctctatccattcttcagttgaggggcatctaggttgtttccaggttctgaatattacaaacaatgctgctatgaacatggttgaacatatgtccttgttgtatgaatacgaactatttgggtatatacccaagaggggaatggctggatcttgaggtagactgatccccttttttcagagcaaccgccatactgatttccagagtggtctcacaagtttgcactccctctagcaatggaggagggttcctttttctccacatcctctccagcatagattgtcattggtatttttgattttagccattctgacaggtgtgaagtggtatctcagagttgttttgagttgcatttctctgatggccaaggattttgaacacgttcttaagtgtctttcagccaataggggagagggagctgccacattaagagcaggagaagaagaggagaggagaggaaatggaggagcagaaatattgagtcgggggaagaatagaggagagagagcaggatgagagataccatatgagagggagcccctataggtctgagaagagatctggaaccagggagatctccagtgacctacaaggatgacacaatctgacaatccaggcaatggtggagaggataacccaaaagcccttcccctaaaatgagactgatgactactctttatgccatcctagagccctcatccagtggctgatggaagcagagacagacatccacagatatacactgacctgaaatctggaatttagttgaagaaatggaggaatgaagattgaaggggtctataccaggttggagaaacctacagaaacagttggcctgaacaaaggggagcacatcgaccccagatgctgtctgggaggccagtacaagactgatccagacccctgaacatggatgtcagtaaggagacctctgcactccagggaggctctgaaagtggattagtatttttccctggtgtaagaagggactttgagagtccattaaagagtttctgctcaaaacacccaccagcaataagaactaatagttgtgtaactctttcttcttcctatatagctctaggaagaaccatgttctagaaaaaaaaaaaaacaatttatcaaatctgataaagtattttagaaattacagcaacaaagaagatgtaaatcaacaaaatgctaagagtgagtgaaacatagaagaatatgctgtgcaggctttaatttacttttagtaagtggttcatccttaaatgtccctgtgaactccagacattgaaaacaggagccaaatacctgccacatgcttccattacgacaatggagagcaatgccttgtcaaaacaagttgagcttcataaacaatgaattctctttgaaagtgataaatttgggctacagaaattgcagttgttagtgtttgtataaacacccacagaacatggaaaaggaattctctacagctgttccttgcagggttttattcaatgaaaattgatgaaatcaaagcaaatgaaaagatctagggacatgcaaacccctctgctcataatagaatggaaaagaaagaaaaatattctgttcatttcctcacatccccaacaattttaactttcttattatttattatttgtgtctttcacatcatgcatctcaatcccattcatttctcccccgctttgtactcacaccctgctgctgcaaccaccacaaaaataaaataaaatttaagagaaaaaaaaggaaaagggacaaatcaatctccccagggaagctgcagtgttacacagtgagtcaggaagtaatccctattatccatatatctttacttgcaagtgctcattgcaaagagtcattgttctggtttgaggcctgtggtttctgctgtactatcaatgctgggccctcattggccctcatttctgtggcagagacaatgaataatgggttgacctaagctgtgtgactcgggaatgaccccaggataatttgacacataaacctcagtgatttcagagtgttcttcagttatatctggataaagtttgaagtcagaagactactagtaagttgacaaagattaaaataagatcagatgtgttctcttaagttttatggttgggaaataccacaatgtgaggaaccacaaaagaggattaggaagattgaaaagcactgataaattaggaccctaattgttcacaaagtcatttttttcatttttgatgttgattcaagaattaaaatttatatattaagatgaatgaattgagcatttattattaatacaataaaatttaaagattgggttcatcaaatattagtattgtcatctcaacactgtctcagccaaggtgatgtgtctaagccaattttcaaattcctacctccccttttacaacaggatgtggaatttgtgagctaacaggttcccaagaagagcactgtctttatgcagaaggatgtcccttctctctgtgaactccctcataccctgacaagagtccagaattgaactgagcccagtaaacattgaatcagagtgggacaatgcaaaagtccttggttctccaaggccatggaaccagggaaccaggctgtctgcactatatactctctgtaatgctttgcattgttgaaaaccaacccatttcttattatgtataacaatgaagtaaaatcaagggaacttttctcctttattcctctaacaccctgaaaataaaagtaaatattactttaacacataccttcccctctacaaactactataagaactacttgagtcccaatgtaaaatcaactaatagttggcaaagtataactatgttaatagagtattacaaaggggtgtgggctgttgtatatgatccaccaaatagtagcaatatttagtgatgactagcaattaggatgcattaaattgtgtctgaaatattgcttatttaatggtttattgttttcagaatgatagcctccataaacaaaagagcttaactttcatctgcatttaccaaatccttattaatgtcttaacaagatgggaaacaatcacaaactatcagatttacaaccccattaaccactgattggtaaataaatgctaatttgtgtgctgcagtaaattttaatctagtaccctaaacacattcattaaaccattaatgtaaatgagatcctttgaagaatttttgtcaatgtattactctacaactatgcaagaaatattgaaaaactgaagcatatagtgttcaggagcctatgggagtttttcaaagggagactggtgctctctataaatataaccacaggtttatatacacgcatacatgcttcaggatagagaaacactcaggaacacatatttctcactttatagtcatttatattcatattactatacaccaaatgtgtatcaggcagtcagtgtctggatttttttcacaaaagctcagacacacagcaatccatactgaaagattagtattttatattaaagatgattatcttacttgcatttgaaactttatattttaattcatgaaatcatcaggaagaatattctatcagtttacccctggcatgagaatagacaatttgtttctttaaataactccagccatgaaggagaaaagcacaactctaacatttcaattctaaaacaaagattgtgtcatttaaatacccttaaaatgaaaggggcttttaaatgaaacaacaattaactgaatgctaactcctcttacgctttgttcttaaactcaaattagttttttgctgtttactcttgaaattaggctatgtacacttctgaacatattacttttaaggtgctactgtgcattaaggttaaatgtaatttcatattgtttacattggtctgaatttttaagagtcaactaatctgttacttaagaatataggaaactttcagtaagctgagacctgatgtacacctacttccacacctttgccttgtcaccttcacatggagctatgctgaatcacttcttatacaaagagaaaaaaaatctttgtagagatcaaacgtaggttaaagtccagtcctttatataaccaggttaggaactatatacttttgaatggtgcaccatgtctactaattccaatgcagaggattaaattctgaaacttttattcttttctaattactattgcaatgttctagagattacacaaagactgttttattttattcttcaaatatatagataatctctacataaacaatgcattaagaaatttgtagactctaatgtaattaagaatctgccatgacacagagcctaaagatgttggtaatttatttaattgaatttttactgtcaagcagcaagtttaagaatcaacaaatattatttatttaatataagtagaaataggactaaacatattcaatgaatatgatattactatgattctaataaaaaaaacttatcccaatttctaagactaaaatcaaggcaaaacagcaaacagtttcagaaatatatcctttgtatcttcctctaagtgagtcacatgaactgtattctagcaaatgtctcaaagctgtttttggtctgcaaggtcacactgaagtaaaaaattaaaaggagaaacaattaccaggaaaaatttgacaaggatattccatatgctttagctttgtaagtcactagaatattccatatgctttgcctttgcagtccctacaaaccacaataaaaaaaagatattgagcttaggtcagtggtgaggagaatgaagtccttttgtctccctactttttatgattagcttatcagaaaaggcaactctgtgaagagagaaccttgtaacaaggtgtcatatgtccagttaaaggcatttggaaggatatccccaacaccccatgagttcactctgcttctgataccactgggaactggtggtttaaatagacaggtgtgggccacggatcgttcccatagaattatgacaaaatgagtcattttttcattcctgacattattcatctatcaattatttttaaagagtcaaggaaaaagaaaacttgagccactactggctacaaagatctcaacagtggaacacaagaatccagttagttgtaccagagtaatagcatcaccctctggttgtgaaaagcaacctattttgactgttttagtactttgtacctaaattacatttgtggatattagataacatattataaaaagcaaaattttccagtaaaaacctaataaatgtttgcttagtgtactcagaattttgtcagctatggagtgttatttagcagaacacttgaaatcctaaaaacatagtttcaagctctgattcaccaagcatgacccagaatttttacaccagtgacatgctgacatttctcgtttgggtttattgcctcatggtcccaagacagcagttgcagtcagagcacatttcaaagtggaggcaacaagttacaagaagaaagtttattctttacacagggactctacctttatcaataaaaggaaatgtttgcaggaagcctcacacagacttcttcttctgatcatctattggcagaagctgcatgaggaggagaggaaacctcccctgccaggaagctgggaaaacaaacatccttcaaagtagaacaagatagctctgactggctgaaccacagctcatcacagggctgcaaacacctgctgttcatacaaaacggaatgattttaagaaagcctggacaaaagtgctggggagttaggcaactttttacaatgctttccccaaatactgttcttgtgtaccatgagcaaaataaacacaagaaagagcagttacttctcagtggcaattaggcaacaagatagtaagtagggtgacattcataatggagtttgaggttgaaggtttgaaggtggaggcgaaatcacagtccaacagtgttctcagtcatttgtgacaatatcatagtagacagtttcttattttaaacatcccacattcaactattctataccacttacagtggtatttgactccctacttagtggagtaggatttcaggacattttgtctgcaaaatcagcaacttgcaaagaatggcacacagggaaatttggaatgtgacagcctaaggctgctgcaatagtttggtaatgccatttgcaggctgcattaattttagttggtgtgttaccatttaaagataatggcatggcctttgtgttcacagcaggtctgtgggagttccagccaaaattaacagtggtcaaggagcacccatcggtatcttcctccagtgaacacccagtaatgacttatgcttttatgtatttgcccagaactctatcactcagtattcttgggtgatgacagtgcggggaaatatccttaaagctgctgctgctgtaaaagattggtgttctattagagagaaggaaaatgcactaactctgcaattcttcctggaggtagtgacagaaatgttcagtggtgttggtgttcttttactgcttctgatgcacctagtttaaacatctcaccatatagtaattaagccctttataatcacaccctgttcttcctgtttaattaatttatttatggtcaaatagatacatatgactgattcaaaacagatgtcagtcaagggattttctatagtccaatgctgtaataaagaaatggtgaaatatgtgtcttttgagagtttccatccttttccatcttcctggtacacttagggtgtatcttagggtgcctggtacactttcctagatttataacattttcttgtccgtgtacccatcaacctgttctgcagtattccatttaagcttattttgttgtctagttacaaattacaagtgcaaactagccaaagttagacctcttataatcaggtactctgtggcccacctgccagagcacagatcctttctatgctcgccagtcatggtatatgctgcttaatgttttccaacttgttaaaaactattctgtataataatcattttgtcactgtattttgacattcttgggataaattcttttcaaatatttctatttatcctctggatgatagctgttttgaaggaattattactatcaagctacaggcagcatgttgatgtcctgaatggagacggagggtgcttaattttcccttgggtcatgttaacaatcttattcctcttagcgcctttgaaagccaattacctgtcgtcaagtctttatgccttgtctgcacctttggggtttagatcaatgattatccttactcctttcaagaaataatttcttataaattatgattagcagctcagtacaggaaagtcaggattgtcttactaaacattcctagtgatgatgtgtctagaggggaaagggctgaaactgtatcatggctaagcagattgtaattggcacatccatgtggacagtggaaaagccatagcactactcctttctgtgggaagaatcagcatccttcacagaatgttccatgccttgaaactgaaaacaaaacactgtgtgtggcagatcggcatttccaaaaatatatcaatgtagtgcgaattgagtcagtcaaagtcccctcaaatggtcaatttcctgagtcacatataagagtaaatttactggcctaagtgatttttatttctgaaactgttcaagttatgtcaaagttctgcataaaacatcagcagagaacatgtgaacattggcactgggaaaaccagagataatcctttacagtaatcttcattatcatggattcttaaaacactctcaattttgttcaaatcccatgaaagcagagccttttcttatttatttttctgtctttgcttggtctgttatgcacatttgtctttattagggggataaagtattattaaatgccaagtgactttagacttagtgctattctaaagattaatgtaatatatgtagaggttatgacttaacagaggagaaaatataaatattaaggatctttaggaaactagtatagaaaatgaatggcaataaaatagagacttttcctatacttcaatttttaaatatggcaaataaatttacaaatggaacttaattcactgttctctcatatgtcataaaatttgaaaaattaatgaatttgtatttttaaagttggctttaacattacacatcttgtgagtagttttcgatgatttctacttcagttatagctatgctatttatttcttctgaaatcaagggaatgaacaatagcgaataaggtgagtctatcagggtatgtgatcttcacatacccttctcacaagagaagctgcagatacacagtaggaatgactgaaggaggaaagatctctgggttatcctactagaggatcatcatgtggggaagggaaagcagtccttaggagctgcaataagtgcaaaagcattaaattcagacaccaaacaaatcaaagtagaggttcatgaattcatgctctcactgagcagagtgtgagaatgtcaaaatctgcacttcctgtgaaaacttaattattaatcttcccctttggggtgtgctgatgaataaatttggttgttttaattagatttttgtgatttatgcatttaaccagagattaattagccatctgcatttatttttctgtagatttgttgtgaccaatgtactttatcgaggcaggagtggttcctccctgttctctagactagtccttattaatgacattctgacattaacagtgaatgcttccacctgtctcttgtccatacttaagagtgtcacaaggaaataccattataatttatcatcaaacattcttttctagatatttgttttttaattattaagaccattttctttccaaaatcacaaaaagttatttacaatttcttctgaagcatttcatttttatgttcttattttttttaataattttagttaaattaaaaacaaacttttttttaagagggaactgggaaccaatcccagttccctctcccccctccaccctcccattgcccctgccatctccccatccaccacctcatctactccttagggagattgaagcctcccataggggatcatgaaagtctgtcacatcatttggggcaggacctagaccctccaccttgtatatgggctgagagcttatcccaccataggtaatgggctcaccaaagcccatttgcgttctagggataaatactggctccattgtcagagaccccaactgtccctacactcagggagcctggttattctcatttttctttatgcagatctttttcaaatgatggtttactgtatccattttccttcataatacacattttaataattttatttttattcatatgaaattgattctcccagcattatttcttaacaaggatatgatgttgtcactaatttaaaaatgccactcttattttaacctcgtgtttatttaggtacagaagaataagtgctgggttgctttggaggctcagtggctagaggtgcatagtcctgcagcttggcatcctaagatatacatacatacatacatacatacatacatacatacatacatacatacatcaagtagattggagaaaactgactcctgaccacacacatgctgaggcatttacatgcacatgcacagacgcacagacatcatacatacataaatctaattaattagtggattttaaaggagtccattatcttcttttttcagctggctttcctgaacctctgtcagtatcgtggtttggtaaaagaggaaggcttccaatggcctgtaaaatattattttctgtaatagattttagcatcctgatactcagctcaatgttaatgctcattgatattataataaaaatggtgtaagaacaatgaagatttccatgaagtgcaagccatgagagatgtttatcatgagtggcaacagtgtaacacttttctcagtactgaaaattgatgagtgcatacagtgcccatttcatacacaaacatcacaagagctgtgctgctcctaatatattcatgattaattcaaatttattttttctcaaacaatggaatttgttaacaaagaaacaaaagaccatagtaattatttaattttgaatatgaaactgttgtgtataacatatgaaagatggagagaaccaggcagagacagtagcacacaaaggccaaaagaagctttccagaataataaaattacctaaggaagaaacacttggtgaatctgtgcagagatatttctggtagaggccagagtgtgcaatacagtgaattccaggccattttgatatcctgtgtcaaaaaatccaaagaacccaacctccaacatatataaaaattgatacagggagacacagcagttttcaaaaaaaaagtctttaaaacatatttcctttatttctttgaatataaatagagaattgattaatataagtattaaatattgttggaaaggctaaaaagtgataccggttagccattatcttatttgttcataaaagaaaaagtataggcactgatattttatgatatggtatgtaaattattgaaaatcagcttttatgatcattacatcctcatcatgtaatgagcatcattttcctgtagaaaagaacaacattttatgttttattctttatgaaatgctatttcagtaaaacttgttttgttaaaaaattaaataatgatttttcacctattattgaatattccagtgtgaaattttaaataaaacatgcagtgcttttcttttgctatgcatatttttcttcctcacttaaaaaggctgaatgtaacttttgaaagtataacacacacacacacacacacacacacacacacacacacacacacacacatatgaatgtgttagaatattgcctacttcatattaaggaaacttgaagcaacacagtaaaatcatgttaatgaaactctctctctctctctctctctctctctctcttcacacacacacacgcaggagtggttcctccctgttctctagactagtccttattaatactcctagttgcttaaaggtttttaacagtgtgtgaaagtctagtttgtaaaccaagacttacaaccttgtgatagaactcaatctagagtcctacagaagtattccccttaatggtttgttatgaactgaacagcaatggtttctgctttttgatgaaaatatttgcctttatactggacctgtgtccatgagtaaagaaaagcaatgttagttattacacttacatttctggttttatttttttcaccttttatctgtcatgtgtgttcatttctctttgtgtcctcataaaggaattttttttgcagattgttttatttgaattagaaacagaattgttttacatgacaatcccagttcttttctccctccagtcctcccctaacaccccccaactaaaaccctacctatcacatatcctttctgctcccgctagagggttaggccttccatagggtatcatcagagtctatcgtatcctctggaatagggtctaggcccacccctgtttgtcttggctcagggagtattcctctatgtggaatgggctcccaaagtccacacctatgctagggataagtactgaactactacaggaggtcccgtagatttccaaggtttcctcactgaaacccatgttcctggggtctggatcagtcctatgctggtttcccagctatcagtctggggagcaagaattcccccatgctcaggtcagctgtttatacataaacagctggtttcaccagcctggtctggacccctttgctcttcactcctccttctctacatctggattccagtccagttcagtgataagttgtgggtgttggcttctacttccaccagctgctgggtgagggatatcaggtgacatataagtcagtcatcgatctcattattaggggtgggcatttaaggtagcctctcctctgttgcttagattgttagctggtatcatctctgtagatccccagacatttccctagtgcctgatttctctgtaaacctaaaatgtctccctctattgtggtatccattcttgttatcttctattcttcccctgactcaaactttctgctccatcatgtcctccgcatccctcctcttctccccttctcattttcctagctccttgccccctcttcccgtgctctcaatttgctaaggggatcttgacccttttcccttctccaggggaccatgtatgtctctcttacggtcctccttgtttactagcttctctggcagtgtggattgtaggctggtaattaaaggagataattttttaaagacttttaaaaccaaaactttaaaggattttatttgacatgnnnnnnnnnnnnnnnnnnnnnnnnnnnnnnnnnnnnnnnnnnnnnnnnnnnnntgcagcattggaacaggaatgaaatggaaggaaaagaaattttacccacaaagagatatctttgacattttaaatacaaagaaaacttttgtcaacttcaaatggatagtgccaatagttgctatttttcataatatatttattctcataaattcattttcacatttttacttaagcaaatatgagaatttatgcctaaatttgttattttcctccttatataatgtggctccttcatgaaataaaattcttcaagaatgcaaaaaattattagttccttgaagtgttatttttgaggaaaaagcacaatgaataatgatttatttatgttatctgatgaatgtgttggtaagtcctgaattttattctttctccattaaggaatataattactaaaatttgtaattcaataatcatcttcagaaaagtttgtaaaggcttatagaaactgtggacagccattccataagagagacagaacatactgtaaatatgtcagcacatgaacgtggagctctcttgctgactggagaagcacaaacaacaatgacaaatccatttataatacaaagtaatagtatatgtctcttatctcaaattctagagactaacttctaaaagatctctaaagacaattatttataacttacttttattgataggttatacataaagtatggcttcttataattattacaatgattagtcagaattattatttcttttacttaaaaatggtaagcatttaccaattatgaagatcttaatcacttttctcgcactttagaattgtggtccactattaaaataggcaaatctttaaaaatagttaactttagataaaccattattttaatttgaaaatgttgaatttatttaccataaaaataaagaaaccaaatgtttgaagtctttgatccattttgagttaagttttgtgcatgccaatagatatgaatctatctgcagtcttctacacaccagcatctagctggtggtagttcaaactactacagccactttggaaatcagtttggcagtttctcaggaaaatgggaatcagtctaccacaagattcactcttatgcatatacccaaaagatgcacattcttacaacaaggacatctgttcaagtatgttcatggcagctttatttgtaatagccagaacctgcgattgttccttcttcttcccagagttctctctctgacctgaagtaccgcccatacctctttcctagctattggatgttcagctttttattacaccaatcacaacaattcattttccaacagtgtacaaatatcccatgagagttctcatgctcagttgctgagacagatacaagactttgaacttagcacagacatagaaatcgcaccagaggtttctgatgtctaagcacggtaggaaagatttcagaggcaaaatggacttccctactggcatatacacatgttgccaaagataagaaggaaaggctttcatatgcaatagcctgacagtgaccataacaaaagcctgcactacagcaaccttgcagaaaccataccacagtggaacacaaacagaatcttagaccaacaacaaaaactctgacaaggacatgttttctttcaatatacctcacagaatattctttttatatttacatatgaaaacctatttttacatcttttcctatggcatttgtgtttccactacagtgctccgtgattcccaaaacaatagttttgtttagataatatctttattttttataattcagtggctacaagaatagcaaaagtgtacatctttatttcttaccaagtttggcatttagactgtgagttaattccccccaaatctctactaagactattaaaaaactcaatggatctgttacctcacctgccctcattgccccattgtatttcacatgctaaactgctgcaatcttgatcagtttattttaaatataagcaacttttagcgattacttatatgacatttaaatctcagttgcttttcacttaaaaataacataaccaaccaataggaaagtctaaaatatcactgtcaaagcctttgtaaataaaagttttattgtagaggtttaaaaagtctttatgtacacagataagcactggacaagccagaaaaagttaaacattcagctcctcccttcgaaggaatgaggtcttagacgttcctccttgaatgcggggaatggatggagtttaaaacctagtgatcatttgttctctgatgagccaggttctacctatatcctccaaaatgttttacttattccagaccctttcagcataaatgttgagcattaattacttctaggccataaaacccatatgagtgatgtcactagtactttgtaacagcctaagtgacttctttgttatcttagggctaggccaatcatgactcccacagacattatgttcacctcagtcattctccctagaccctaaatcttggggagtatctctgagtcaacagtactaatttttgtgaaagaaagcagatatactttgtaaagaatttcaatgtaagcatatcttaaatttgttgcatctgtgagactgagataattattattagaaaacttttttaccaaaattgtgtgtggattaaatattgctaaaataaaccgactaatgtcagggtttcaaagtttggcccaaaactggttacctacatccagcttaactaaatttcattcttactccatcttgattatgtgcgtgttgtttgaaaagcctgcagcaatttccacacactgggttttatgatgcccacctcagtgggtctgaggaaatgatttaatatttgagaactgagaattaatcatcatccaaacacagtgaaaggacaagtatgggtaaactccccaatcctaaaagtatttgttatttatagataccaaaatcataccatactaatcttcttttgcctagacctatttttgtaattattgattaactttgttcttttaatattctaaactacgtataatgcattatgcttgctttcctgacaccccatgtcaccttacttctacaatatcaattctcacttccctttcagtcccatgcccagtttcattgccctatattgtgtttcttgatccagagggttttccctcatcctatgatttactgccagttactataagatccattgtcagcagcatatttaggactttagaatccaaaagcaggcatactgtcacattacatgaaagcatctgtatttatatgacaactttcatatatgatcacaatggttttacatctcattttatgctctccaccctctgtatcttttgaacaaaattgtgtcttacttctcattaaaattttcctactgtaagtttcttaatgaatacatacataaaataaagtgattctatgggcctaaatggttaaagtaccatggattaagaataaaagagtaaatagcttatttaactctgcagccaccgtgcaactgaatgcatttgattacatgcacatgtttttggtcagctttcctatggactttttttcccatttatgtgtattgtattcctttagctgaggaataaactccatgtatgttccttagagtaagctcactgaaaactggaaagtgtcagtcactggctcaagtcacagaagtattaattctgcaatttgtaaacacctgcctcccaaggccactgcagttgaggacaaagtaggtgtggtcactgtgttaagagctcatagtatgacaagcctgataaagtatgctgttctaaacatacgcaattccaaaaaaaaaccagaatctcatggagaatactgacagttaagtttaattttaacaaagaaaccatgattgtgtgagagggaaataattttcataaatatgaaataggcaaacacaaacattttaaaatatgaaattgatgatgaaaatgaatgcattcagttaaattacagaggttagtgtcagtatccaaagtagtggtttgtttttcataaagatacttattgactgttatgaataaatcaatccaaatttataagattgtagacatctgatgtcattcagatatattcaaattttctctgaattattaaaattttcctcaatagatttgccaaccaaaacattgatattcacaatgatatgcaccatttaggaagaatcttgtatcatttcttatatttgtaaattaaaaatattctaagacttaagtctgaaaaagatatttggaaattaaagggtagttattttctaaataagaagggtgtcctattaagctaggaattgtttgccaggtgtggacaactcatggcaacacagtatgccattattttaatataagcaataaacaaacaccacatagcaacctgcaagttagccagtgtttctctatgctgaaatcaggtatgctgtaacttctatgacccactctgtgtcctattactatgctgtcttaacctcataaagttttattccattctttttcactcaaagtttgtacactttctcatgttttcagttcctgtatttctctgtgtgcctctgtgtggccagacttgaaaatgttttttctaactttaaaaaaatgtctcctgcttatttgttttaaatttgaatatataaattataattttattctatatccctttaacttaaacataaatgctgaaattttagcttctactctcatatcttttcaaataaactaagttcctctgcttttccttttcttatattaatctgagatgacttcccactctaatatactgtctgtggatgaattattgtcctcataaaggtgggccccagacttctttaacttaggacattgtaaagctattcaactgtttatgtcacttgctaggttgaatatgtagcatctaatgaatgtctatcctattctagactacaggtatttagatgaaggtatcctagattcacagaaaacaatgaataaagttttaaacatttcactgaaaagaaggtagtagaacaaaacttgtctaaatacttaaagtactgtaaatcagtaacaggcagtgtaaaaagtacctttcttatgactgaacacttttgtgagatatgctgtgtttgcaaagatgaaattccttgactcttgccatcaggtatttgtaaaatctttgtgaatgacagtaagaaagggtggaggagtggagaagaagacaagagaggaaaggaagacggtagagcaaggaaaaaaagagggagggaaatgtcctaacattgtagtagcatgtaataaatcatctctcttctattgtcagatttctgcccataaataaccacttgttattcttccattttttctttggtgtgtgtggggggtgtcagggtgtgggtgtgtactttaagctacagttttcatgacatttttgttctatatagggtctttctgtttgtttgtgctgtttttaatctactttctaggaaatttctggttttcaagtcatctaaaatgatttggtttcattaaaacttgggtattttaaagttgagctacagttcataggtttttattaaaatatatttactgcacactttatggataacactaaattaaaagtcacgacagtcttcttacctaatttttggatttaatttagaatacaaattagcttttaaaattaagatgtcaagttgcaatatagtaacaaagtagctaagtatgagggttgggaaatgaataagattgagtgaggcaatgtaatcaaaggattttggttttcaaaacagattttgacagacattctcagttgtagagtgtttgtccaatgtgcttagcctgtatctccaatggcaaacaatgggatgatttgttataaatttcaaaatttatctaagctcatgtattttgtaaaattatccattcctgtatatttgtcatgtatctttcaaagctgtcaaatataaattttattgttattgcaaacaagttattcaagacatctttctctaaaaagaaagcaatatttactagaaacgtttaaatggaagttagaaaatatcagcatatattgaaatagaatatatagtatggaaattgtagatgtctgaactttccttttcaatgcttttcagatctctaattgatatcaaattaattgactgggcctctgctaattagtacctcaaaataaaacaaatgataatacaaccatgtcttacaaagttaaaaccatcctatcatgaatttcaacattgttcagaagcaaagagtctttgatttaagatatatagtgatagaatgcttataccaatatcaaagtgtaacattatttgtatgtaaatataaaaacttgctcatttccattaaaaataaatggcaagcacttgtacatcacagctgccaaatggaatttctcagagttgtaactctgtgcagcatttcatccatctttttgatgggcttagaaagatttatacctggaatagaatgcacaatgagacaaggaaaaaagaaagccaaagctgctaaaaatgctaataataaatagaagcatctaacagctatcatgttgaattgtgggatgagcatatgtattgattaaaatatttcagccagatatattgagataataaaaagagaatgcatttatgtggtatgcagcattcaattaaaatgtctcacataaataagttacattttgtgagaaatcagttcaaaacatccagtagcacaagtgtgaaatattgttagctctactgcactgtttagcaagtgctttttaattaaatcaagttccaaatccaacattagatcacagagaggaaatactagcacagaaaactcatcttatttgtctttcaaggccaacagaattgtccactcacttgccaagattctcagtgttatagaagatgtggcagtggggactttctaaaaatacaactcttgtaggaccatgatgtgggttgcccctctgtatactatgaacatgttttattaccatttgttaataaagaatccaatttggataatagccaggtagaatatacttaggtaggaaatccaaacagagacacagagagaaggaaggcagatgtgaggtaacacgccacaagcctcatgctaaaatataaactactagaaatgggataaattaaatgtaagagctatgcagaaataagcatgagccattggtcaagcaattgcaaactaatattaagcctctgtgtggtaaccttggaagtggcagtaagttttttgggactgggcagtcaggagaggaacctctgcttacagtccttctttatagaagatatatgttttaaccagtttccacaaagagaaaagatcacagataacattagtgctaaggatatagaaggcatggggtttttggtccttaaatgtcaagaattctgttgttgttgttgtttttttttctaaaattttggtcagtttttttttcttttctttttctttttgggtttttagagacagggtttctctgtgtagctttggagactatcctagcgctcactctggagaccaggctggccttgaactcacagagatcctcctgcctctgcctcctgagtgctgggattaaaggcttgcaccaccaacacccgggtcagtcagttttaattcttgtaatctttaagatataaaggaccaataagcacaataatcagtcagagctggtgaaaaaaggagtgacctatgatcactagcagtcagcatacagaagatggtgcttagcaaacattttataaatttgtgactccataatttctttcatttttatttttataattgtaatcagaccaattttaaactagaaacaagcttcttttacatctcaatcccaattctttctccctcacctcctcccctgctcaaccaaaccctatcccaaaccctttctgttccctagggaggggaggccttccatgggggatcttcaaagcctgtcatttggagcagggcctagacacaccccattgtatctaggccgagagagtatccctctatgtgtagtgggctcgaaaagtccattcgtgtactagggataaatacggatccattaccaggacctcctgaaactgagaagcttttgtaaggcaaagtacacagtcaacaagaaaaaacaaaaaaaaaaaaaaaaaaaaaaaaaaaaaacaaaaaaccaaaaaaaaaaaccaaagaacagtagcccacagaatgagaaaagttattcaccaacaccacatctgacagagggctgattcccaaaatacacaaagaactcaagaagctagtcaccaaaataccaacaaatccaatgaaaaaatagggaacagaactaaatagagaattctcaatggaggaatctaaaatggctgaaagacatataagaaaatgctcaatatccttagccattagagaaatgcacatcaaaaaatctctgagataccatcttactcctgtcagaatggttaaaatcaaaaacaccaatgacagtttatgctgtagaggatgtagagaaaggggaacactccttcacttctggttggagtgcaaactcttacagttactttataaatcagtatggtagttcctcaggaaaatgggaatcagtctacctcaagatccattaattcctctctggggcatatactcaaaagatgcatattcatacaaggacatctgtccaaacatgttcatcaaagcattatttgtaatagccagaaacttgaagcagcctagatgcccctcaactcaagaatggatggagaaaatgtggtggtacatttacacaatggagtacctctcagcaggcaaactatggaatcttgaaattcccaagcaaatgaatttacctagaacaaaccatcctgagtgaggcaacccagtcacaaaaagacaaaatggtatgtactcactcatttatgaattttagacatagagcaaaggattacagcctacaatccacaccacaagggaagttaggaaacaaggagggccctaagagagacatacatggcccctcagagaaggggaaagggacagtatctcctgagctaattgggagcatgggggaggggagagggagttaggagaaagagaagggaagaagaggaggggagagggggacatgagagagaaggaagatttagtcaggggaagaatagaggagagtaagaaaagagatatcatagtagagggagccattaagtttaaagagaattctggcactaggggaatgtacagagatatacaagtttgacaccaattaacaatctaagcaatagttgagaggtttccttaaatgcctttctctgatcaggagattaatggctactttatatacctagagcctttatccagtagatgatggaagcagaagcagacacccacagctaaacactgagctgaactctggaatacagttgtagagaggcaagagtgatgagcaaaggagtcaagattaggctggagaaactcacagaaagagctgacctgaacaaggtagagctcatggatcccagactgatagctgggaaaccagcataggactgttgcagactcctgaagtgggatattcatttgaaagcttatgtcttaaggagacactgtttgtgtaaataataaatgggatctaagcagagcttcaattcattccctcatatgcatgccagaatgcttcttcttgtctttaaataatgttaaaaacacattacaccagaaatttgaaatcaacttaacaaaatttgatggcctttgacaatatttctatgggtcttcataggttaattctctcactatggtttaattaaaaatgttctctgcatattttcttaccttcatgctatgaaaactaccttgtacaatgagtgctaattagggagagagtgcaatcagagagaaattgttaaatatgtggcccacagaaactttccaacatagacgtgattttaatgaatgtgaattattttaaatatctgggataaagtttggatccctttcagaaggtattttaaaatcagccagcttcctactgcttaaatttaaatggtaaaatttccagttgagatgtgtaatcattgctctacttgcaagtattcagtatgcatgaagttttagatacacaaaatattcatagactgagtatagagtgagccccacatataaaaatgaaagtaaaatttcctgtcaatggatgtcaaaagaagacttctgtaatacttgtgtgatccaatcactctccttcttaagcgacaccagggtagccaactgtcctcttcataaatgactatttcatatgctttcagtatggggagactaatttagttttaataagaagcccaatgaatattaaatctacataatcaagtaatgtattctatgttacatgatcttggtgtgtgtcaaatatcttttaatatttgcaagaaatgtagacatccattactgtaacaatccactgtcttttccacattcatgcagcttgcaacaactctagcaatattctactttatctttttctaatgtttctctaacctgttgaggactgattagtttctggttcagaaaaatcagtggtaaagctggtactacaggcaaaagacacaaaggttcctacgtcttggttaagaaatggatatgctgcattagacaggtgtgctgtagaggtgttcatcatgagtgaaaaggtaagaagatggtgctgaaaaaatgaagtaatctaagtgcagacaaaaaggtgtgctgtgtctgaggtcctggtttcgaaaatgagtaacaggattcacagtatctgttctgttagtgaaataccaaatcaagagaaaaaaagtcattagattttggataggtgagtaaaacacagtgcagaacctctgcatcaagctgtgtcaagcatgaaaagtattagttatgcttctattgtcagtctctgcctaagtgtaacaggatttgaattttgacttttccacatgagtacaacatggaaaagtgtagtcactggacagggagaaatatcaagattccccagtcagcaactacaaggatacaaaagctaaataatagagtcattgagacagaggctggcttcttatgtaaccaaataacacaagactgtaacaataaatctttctgccaagcctcccaagtcctgctgccacatgggcactttctgccaggctgcacaagttctgcccgccaccactttaaggtcccaagtaacacagagagacttatattaggtacaaatgctgcttggccaatgactaggatttctcatctgctagctcagtcttacttatcataaatctatatattttataagatttatcttatgggatgccaggagcaagcatcctgtcttcccaggctgacatgatgaatctgctctttctcctacctttcccagaattctccttgactcccagtcccacctatcttgttttcctattgcccagcagtactttatttatcagccaataagacaaccatatacaaagaaggacctccactaccacaaggcctaagaataatgggtgcaaaattattaaaaagtctaaagaaagcaggaatttcaaatgggagcaatgctccggtgtaaccctcaatactgtttaatggtttcctccctccaatgaaaaacagtactgttcttgaacagtaagcagcatttattgtgtgaaaatataaagaaattcataggaaactcttcagatggttgtaatcccttagaacacacattttaacaagaaggagatacaaaataattaaagatactggtctatgtatacataaatgtgatatacaattgatagagtatatgtttttcattttgtagaaaaatttcaacatcaacaatatattcaattatattcaatgacaagtagtatgaggaattttatgtggaggagaaaactgccaaataacaagtgatgaattaagttgcatgtggcctcccagagaaggcagacattgatctaaaaatttacatatggtatcctcgagaagctagatactgacctaagaatttagtcatatgtgactcaccctttcccaccaactcacacttcttagtaaaccccattttagttcccttggctttctctttttaaaacaacttggtttatgttcaccttaattaatgtcttttctctgagtgttcattcagtctgcaatgctctctacatggttgacttattccattatcaattatcacctaccatttccctctgtgagcaattttctctgatatgctccatttttgaccttacttcctgcatagcatgtatcataatgggttatagtttgttctgtctgaatttatacataactgtatttagccactccatattcttcttcctattctcccatcactttttgaatgtagaggtgagactctttatattacttactctatttaatcaatatttagtgaatgaatgtacaacgaataaatcaattcagaagaaatatctacatgtggaaaaaacagagatttgcagggattacattattaagctcttgtgtaatgtagcatgtataaatataacagaaatcttttagttgtaaaaatgataaataaaaatattatgctcctgggtggaaataacagacttaggtggatttatatttattctttttctttcttggtgtacatcttaacatagttgcacttgtaaccaccatactgtagtatgtgttacctggatgtcataactgttctccttgacattggaataatcaccatattcaggttggctttttgttattatgctacatagagactcacagcatatttattgtgctgcttgattttcaaagcctttcttttttaataaaatcctaatggcatattgatttatgatatagcatatccacagccactggaattcttacagtgatgcttcaagaagctagttaatgctaatatgatcttaatgtcatgcttatggtcttaactgatcctaccaggttaaccctcagaatattaaagcaaattattcttacaccaatgacaaagtcctattaccctagaagtactagttctgatttatgatgtttgtaattgcaattggtgtcttaggccaaagatctcagatcttagaatgtcaatgggatgagctatttatatccatgatcatcaaccactatttatgagacactgagtagcttatattgattcaacttttaaagctagcacctgtatagtatatagaaagttcattatagaatttcatgacaatgtgttctttggaaagaaagtaatagaatatataactcataaaagtagcaatagaggctttcgttggttagacatcaccaagaatatcctgggaattaaattcatatgacaggaagaagacatgggtggacagttgggggatactatcaatggatagggttgcaatcatggtagctgatgttgcaagtaccagtggtagaaggctgaagttaaaacaggatggtattaatggagatgagtggtcagagatagaatacagagctgcagatttttcacaatattatgttatataagtagactttgtacttgatcccattggcactgaggaaccacacaggtatttaggtctttggacttactgtgaattttgggaaagaatggatccagagagaattcctcaaataagagcacaatacttgtccatttgctactgttcaaaacatagagcaaaagttaacatgtgacattctggcctgtggttcattattacttgtggataaatactatgacattaaagaaagaaatgaagaagggtcagaaataaattatggatattacttcttaatttaaaaggtcccactgagtatatccatttacaaggtatgtgttacacatagacattccatggaagtgtgtattttatgctacattcgtgccatgtctacatatgtgactttatatctacacaggatcaagttaccattgttgagatgatactgtcaacatttgtttctctgtgactgaatatgctcataatgattacttctccttatgtctgtattctagaacctgacaaatccctgtacttcctatggctgagaagaatgtcagattatctatctatcatctatcaatctatctatctatctatctatctatctatctatcatctatctatctctgtagggagccgtccctgcattctccattacaagatggcgcctgcatccggcaggcaccgaatgtaaacaagttaatgcacaggcgctgggtaactttccatcccttggtctctgcctcttctgtggcatcatatggtccgatgagctgcagccaatcatagggtgacacaacccaggcggcggtcgccagcctttattaggggacgggattcttggctcggggtctccgctctggtaagcttatgctctcctctcaagacgcattaaagctttactgcagaaggatccgaatgtcctgtgtcgttcttgctggnnnnnnnnnnnnnnnnnnnnnnnnnnnnctgtagggagccgtccctgcattctccattacaagatggcccctgcatccggcaggcaccgaatgtaaacaagttaatgcacaggcgctgggtaactttccatcccttggtctctgcctcttccggggcgtcatatggtccgatgagctgcagccaatcatagggtgacacgacccaggcggcggtcgccagcctttattaggggacgggattcttggctcggggtctccgctctggtaagcttatgctctcctctcaagacgcattaaagctttactgcagaaggatccgaatgtcctgtgtcgttcttgctggcgaggcgannnnnnnnnnnnnnnnnnnnnnnnnnnnnnnnnnnnnnnnnnnnnnnnnnnnnnnnnnnnnnnnnnnnnnnnnnnnnnnnnnnnnnnnnnnnnnnnnnnagaactgcagggtggtaagttcggagaggtatgctttattctgacaccttcttttttgactttgttcttaatttctcaccactatgggatgcatcagtaaaagccttaattctagtctttattacattggtcttatattgtgcccaccatggctggtgttccatttcgagaccaagcttaccccgggtagcctccagcataatgggctcttcaaaacagagagacctaattaaaaactgtctagagattgaggcttgccgtcccatggtagcagagagtcaaaaaacgcttaaagaggtacaggataatatatcagaaaccgaacgagatgagagannnnnnnnnnnnnnnnnnnnnnnnnnnnnnnnnnnnnnnnnnnnnnnnnnnnnnnnnnnnnnnnnnnnnnnnnnnnnnnnnnnnnnnnnnnnnnnnnnnnnnnnnnnnnnnnnnnnnnnnnnnnnnnnnnnnnnnnnnnnnnnnnnnnnnnnnnnnnnnnnnnnnnnnnnnnnnnnnnnnnnnnnnnnnnnnnnnnnnnnnnnnnnnnnnnnnnnnnnnnnnnnnnnnnnnnnnnnnnnnnnnnnnnnnnnnnnnnnnnnnnnnnnnnnnnnnnnnnnnnnnnnnnnnnnnnnnnnnnnnnnnnnnnnnnnnnnnnnnnnnnnnnnnnnnnnnnnnnnnnnnnnnnnnnnnnnnnnnnnnnnnnnnnnnnnnnnnnnnnnnnnnnnnnnnnnnnnnnnnnnnnnnnnnnnnnnnnnnnnnnnnnnnnnnnnnnnnnnnnnnnnnnnnnnnnnnnnnnnnnnnnnnnnnnnnnnnnnnnnnnnnnnnnnnnnnnnnnnnnnnnnnnnnnnnnnnnnnnnnnnnnnnnnnnnnnnnnnnnnnnnnnnnnnnnnnnnnnnnnnnnnnnnnnnnnnnnnnnnnnnnnnnnnnnnnnnnnnnnnnnnnnnnnnnnnnnnnnnnnnnnnnnnnnnnnnnnnnnnnnnnnnnnnnnnnnnnnnnnnnnnnnnnnnnnnnnnnnnnnnnnnnnnnnnnnnnnnnnnnnnnnnnnnnnnnnnnnnnnnnnnnnnnnnnnnnnnnnnnnnnnnnnnnnnnnnnnnnnnnnnnnnnnnnnnnnnnnnnnnnnnnnnnnnnnnnnnnnnnnnnnnnnnnnnnnnnnnnnnnnnnnnnnnnnnnnnnnnnnnnnnnnnnnnnnnnnnnnnnnnnnnnnnnnnnnnnnnnnnnnnnnnnnnnnnnnnnnnnnnnnnnnnnnnnnnnnnnnnnnnnnnnnnnnnnnnnnnnnnnnnnnnnnnnnnnnnnnnnnnnnnnnnnnnnnnnnnnnnnnnnnnnnnnnnnnnnnnnnnnnnnnnnnnnnnnnnnnnnnnnnnnnnnnnnnnnnnnnnnnnnnnnnnnnnnnnnnnnnnnnnnnnnnnnnnnnnnnnnnnacacgtccgaggcggcggttgccagcctttattaggggacgggattcttggctcggggtctccgctctggtaagcttatgctctcctctcaagacgcattaaagctttactgcagaaggatccgaatgtcctgtgtggttcttgccagcaagactatcgagcgggacatatctctctttgtgtgtatgacattttccttttccactcctctctagttttaagtaggctggctcaataacttagctaaaattagtgaaaattgctgcaataaaaactaatggacagatacttctgtgatgtgttgcattggagtcatttgttaaatggccaggaatggtataactgatcaaatgagagacctgaagtttttttggaagtttatggggaccctccacattgattctcatactgactgggtgagtttaaatcctcccagtagtttatatgaattccctttggtctatgcctattgtaattttttagtggtagacattctgactcacattagatagaatttcaaaactcatttagtttattacatttattgtttcattggtggagttgtaggtggataaaaacatcaatgaggtagtaaagaaaaagagaaatcaagtgttagtggagtatgattatgtgtggttttcgcttgtgagtttgaggcacggcaaggcttccctactcaaatctaaagacaataagacattgggttctaagtttaagaaataatttattgttctaaaggaagtagtaattgagataaaaatagaaatgacagcagctgaaacattacggttaccaacttcccctctacttcggatttccacactgtgaaaggaagtatgagatagtgtgtgcaatatctgaattattagagatgttgaagtgatggggtagggatgggggactctcaaatgcttaaagtaaagcccatccatctctgtaagaagtagggtggaaatcaaagtcctacgttatggtgactgattttagctattctttcgtcaagaggtagtctgagctttgtctatcatgatattagggtatttaacattcattgtgatatttagtagcaatctcagtatgagtatatccaggccttcatagccagtctctcctctttattcacctatagttgtttttattttttgaaaatttcaagcatgtattcattgtaatttgattgtctttacactgatctctacacctaatcccctttcatggcatccatttactgacccattgagtttgtttagagtacttgaatgtggttgaagcattatttaccataccatgagcatattactggtggttataccagtaaaacattggccccaatctacacctttctgtaaacattaaccacaaatagctttttttaaaggctcaggcctcatgagcctctttctaatccatgataggatagggaagattagaagcttctgtggatcatgggtgggtaggaattcgtatccaactataggtttagcagtaaatggctagtctgtgccaggaagataacatattctgtagtacactatccttttgttctcttatattcttcaatccacaatttttgggatgttctgtgagccttaagatattgatgcagacatccaagtttgggatgagcttttttgagtatttcttaattacacagttagggaatcattcagatcactgtcttagatccaacatattgggaataccaaattgtagcaggctttttttgggtccaccaaccagctcccaaatcatgacacagagactccttattagttgtgaatgctctgccttatcttatgcttgtcccactagcttttataccataatctgtttctattcatctacattttccttggggatttttacctttctttcattctgtatgccctattctgtgtgtctggtggcttcctggctggccagccctgggcatcaccctgcctttctcccttgttctctctccatgttctgaagagtagattcttccatctacttattctttctgcctaccagcttgcctattggccattcatctgtttattagaccaatcaggtgccttatgtaggcaaagcaacatatctttgcagcattaaacacagcataaacaaatgaaacacacatttacatagttaaactaatattctgcaacaccagacagtgcctgtccccacctgctcaaaggaagatcacaactacagcttcaggagctttcttcactatgtcttcctcctctattaatcacaatacgaactaaacagttcaagcaggaagcagagaaacattgctatctcagaaggagcttgaagcagcagaatttgggggtatcaccagtcctgccaatgttagcctgtcataccctatatcactgttcagcctggcatgtacctgaataccaagaaaacctaaaagacaaaaaggagattaattgaaggccatttaaactaaccaagtgtttgaaacatttctactgagtctgttaattatattttctaataaaatgctggtaatttaaaagattttatctctaaagaaccttcctcttaaaaagaaaaagaatgctgtcaagctaaactgctactagtgataatcacagctaaaaaaaaattggcagcattcaggggaattttctatcatctaatttttctaagaagagaaaaaaatcagtaagaatccaaattttcaatttgtatatggaaaatgatatctattcaattttcatctccagttttctttctgggtttcaatgacatatgttgggttttacagattcattggtccttgaatcccaatcacatgcacttggagatactcaaaagttctggtccaaggaccatcagtagtagacatattgtagatgattaggaaggtgacaaactacatggttaacatataatctgcaaaatctttttttcattactgggtataagaacattacaggaagaattttcaagtttcaaccgacacaattttaaatgatgtggttgctacaatagagaactatttaatttcgactctcttgcacaactaagtctactgggacgattttcttaagtaaaatatgattgttgtgattgttgacctaaaagcatgtttccatacatcatatagagtttcttaatttgatatgtttaaacatttctaaaggtaaccacttctaataacatgtaatgtagagcttactcttgtgttatggaaggtggaaatgaaagggttttatgtgctgtggcatcttcagtgcttcacagacatttctttcttcagctgagaacaaatgggattaataaactgtgaccattgttcctgtagcaaggtacagggaaactggattgccattctcaaacaatacattagatctgtaggaaggaggggaaattcacactttatttaaaaagaatcatggcctacagttttccctgattactttagagatccacaaacaccagtatgtgaggtgaggctctgagagacactgaccatgtgaacatggaaactactgtcaattgtcacaccagctataccagaacatcacatatgatctggcatttatgtcctaaagcaagattcagtatattttactttcaggaaactgctacattgtcccaaagatcttcactgaattgtggaaaagcctaactgaccaggtttcctcctgggtttcatatcaatatgtggctgagagagattagtttaaaacctggtaatcacattcccagggagcagagcctgtgttggagctatgatgccttgtactattgtataagagaataaggaagcactaaggctcatgaacatttcagctaatttctctggctgtggagagtgtggaaaggagatcaaggcactagccagctatgggaggctgagttggtagcttgtgctttataggagcatcactctgcttgatgacttcagtactttctagtttgaattttgtctgtattccaaatatgcattgtaagtctgatattaatctgagaagttacatgtattatgtataatttatagtttccatgcaaggtattagcatatacatgtaatgcacttttccatttttttttaaaaaatggagatttagttctttaaaaaattcaatctgcacatacttcatcattatgaaaaagggtgaaatagatttatagttttcttttcatatatctggtctgctgtatcaaaactattgttaccttagggggcctaatgtcaatagaaatatatttatcttcattggggatgttgagaagtacaaaatcaaactgtcagttagtttagtgcttagtaaggatctggtatatgaaggaaagatatcctctaactgaaatcacacactaggaggatgaactcaggtgctcaactctcaaggtactggcaacttgggctttgaaaagtgttcacattcagagggtcaatgtccaatacaccatctgagtggttaggtgtgatgtatgaatttggggagggcacactgtttgaagcacagtatgttctagagaaatctcttgtggggtgtaaatttgtgtacatacttagaaagcttaacagaaagagtctacctacaaacaaacataaataggtcttgtttctgatcaaataattaaggttaatgcatttgataactccaagatacagatcatataatgtaatggttaagagaggtgggagttaatggggttgcaaataatatagtcaccgccttagctgtactagcaggtatccccacattcagtcaggagggggtttctctgtggactcaatgcagtcttctaggtgagctttttctgatgctttgttgtcaatgtcatgtatatatgtgctctatttatccttgactgtaggtgcctgagaggccagcagtgtggtggggccccctcaatctggagttacattatacaaatttaagtatttctttgtcaaggatggagaggtgactcagcaattaaaaaggcatagtactatttcaaaagacacacatttgtttcccagaacccatggaaggttacaagcatgtgtaccaccagagccagaatatccaaggcctctgaactctgtggacacttgaaatcttgaagtaacatacccatacctacatgcttgtacacacacacacacacacacacacacacacacacacacacacacacttgaaaataataagttatctttagaaagtatttctttctcattaaatatttcagtattaaatatttcaatatcctaaatataaagctttattgattttattcaatatctgtctatatatgttaaatatataaaacctagcaaaatatataatattctctaagactggaaataatccacgagacattgaaatgtatttgtttgctctttgagagtggggaatcatagtaaatgaattggaaattgaacgaggggatgctgggatagacaggatgaggttagcacagagctagagagcccaaagaacagacaaacattccataaggaaaccattatattacatggtcataaaatggagagtagcctggaaagatggctctgtggataagacaactcactcttgtagaagatttgagctcccaacactcatgtctggcagctcagcacaaactataactccagtctgaggggtaggaaccccattgctggcctctcaggcacctacactcagggataaatacccacataagcacatcacattgaaaataaaacaaatcattggaaagttcagctagattgaattccgtttatcgacctccgaaaaaaactggatgtgggaatacctgatactatatctataggctttcactatcaagacaaattgagagttttaactttaacactagcatgtctcaaaatacgtagtgtagttcaaagtttcaaaatatactaaaatttaggaatgttatttggaactttcatgcttctgtaccaaatggtgctgtttacttttaattatgtagggagcaaatgggaaggtatgggcaaaaggaagggatagattttagaagttctgtgtgtcttacttggaagtcaatattaaacaaaattttagtgatgaccatatgtttgatattgatagtacactctattcagtatagcaacgaagtaagccagagtagttcagggctgtagtttcaatattgcttttacaaaattgaaattagctctgggcttggatccccagagggcacttagatataatttggttaactatcgctttcaaaacgtaatgccattcgtggtctttaaggctcccaggcagggacagatacattatttctgtgaataccttagtcaataaatgtgccaacaaaagatgcctgtacattcccaatctatccacctttgttctttatataatagaagattattatttatttctaaagctacatcttgatctattagaaatgtcacttatgagaataatgtcctgggacttctaatacgtggcaaacaagaaaatttcctatagaggacacatgtcaggttatgatataaacatcttgttggagctagagagacagctcagcaatggaatgcacctgctactcttccagaggacccagtccagttaccgatacccacatggcagcccccaataccacgtgaatcctgcgatatcatgcagtaagcacagcaggctctgtatcagctgtgccatctccaagacacagtagcagatttcatatgttctgtcctttaaaagatagaaatatcagagggctgctaagaacactcagtggttaccagagcaaatactcttgtcgaggaccggacttttgttctaatcacccacactactttcactggagtcattaactctgagtacacaaaacctgcttcttgacagtatcagccccacttacttgtgctcagagcgtagccttcataacacatgcacacaaaggtaaaagattctaaaagtaaatccttaaataaattaggggaaaggcaactgattttcaaatctccacccacaccaccttgatcacgtatgtaatagatacacttacagatgcaaacttgtgcagaaattaagtatgtagcatatatgtttgttcatgattctcagataaagatccaattttccacaggttcaaaatatacttaatagatgtgtgccatgtgcacatataaaagtcccttgaatagaacatcatacttgttttagaattctgtggatgctaaattgataatttgacaatttcagtaatagaagctttagtttcaacttgagaatggaaagttatataactaggtctgcaggccttctctagatttcttcatgctgcatatacttattttgcatgagcttgatcatgtcatttatgggtattaatgacctaaaaatgtctgttccttggagggacagaattatatgcatcatagatcaactaggaagtcttttttttcctttttaaaaattaaattaattttatttttccctttttaaatttaaatttaaaaaaagctgttttacatgtcaaccccagtttcttttccttccctccctcccctgacgccaccaaaacactatcccatctcttttctgctcctcaaggaaggtgaggccttccatggggatctgaaaaatctatcatatcatttggaacagggcctaggtcctcccctatgtgccaaggctgagagaatatccctctatttggaatgggctcccaaagtccattcttatactatggataaatattgatccactgacagagtctgcatagattccccagggctcctaactaacacccatgttcatggggtctgcatcagacctatgctggtttcccagctatgagtttggggtacatgaactcccacttgttcaggtcagctatttctatgggtttgtccagcctggtcttcatccctttgctcatcaattctccctctgtgaagctggattccagtggtttggctcagtgtttacctgtgcatgtctccttctgcttccttcagctactggatgaaggctctaggatggcatataaggtagatatcaatctcattatcagggaaggacatttaaggtaagcatcttcagtactgcttagatattagttggagtcatacttgtagatctctggacatttccctagcgccagatttctctttaaacctacaatggctctgtctattatggtatctcttttcttactctcctctattcttcccctgactcaatctttctgctccctcatgtcctccttctcctaactccctctgccttcactatgctcccagttggttcaggagatcttgtccctttttccttctcggggaaaaacatgtctctcttagggtccaacttgtttcctagcttctctggctgtgtggattgtaggctggtcctcttttgttctatgtctaaaatcaatatatgtgtgaatgcatatcatgcttccctttttgtgacagatgttacatcactcaagatggtttcttctagttacatacatttgcctgccaatttcaagattccattgtttttattttccaccaagcagtactccattgtgtaaatgtaccacctttcctttacccattctttagttgaggggcatctaggttgtttctaggttctgactattacaaataatgcttctatgaacatagttgaacagatttacttgtatgaatgtgcatcttttgggtatatgcctaagagtggcattgctggatcttgtggtagactgattcccatttccctgaagaaccaccatactgatttcctaagtagctgtaagagtttacactcccaccagcagtggaggagtattctcctttctccacatcctctccagcataaactgtcattggtgctttttattttaagcaacgtggtatctcagagttgttttggtttgcatttccctgatggctgaggattttgagcactttcttaattgtctttcagccattttagattcctctattgagaatttcctatttggttctataccctatttttaaattggattatttggtgttttgatgattagcttcttgtgttctctgtataatttggaaatcacccctctgtcaaatgtggagttggtgaataccttttcccattctgtaggctgctttttatcttgttgactgtgtcctttgctttacagaagcttctcagtttattagttgtcaatctcagtgtctgtgttactgatattacattcaggaagtggtctcctgtgccaatttattccagggtacctcccactttctcttctaagagtttcagtgtggctggatttatgttgaggtttgatccatttggacttaagttttgtacatggtgatagatatggttctatctgaagtcttctacttgccagaatccagttatgccagcaccatttgttgaagatgctttctttttttttccagtgtataattttagcttctttgtcaaatataaggtgctagtaggcatgtgagttattatcaatattttaaattggattacattggtctacctgtctatgtttgtgccatcaccaaactgttttcaggactatagctctaaaacagagcttgaagtcagggatggttatgcctccagaagttcatttattgtacatgataatttcggctatcctgcatcttttgtttttctatataaagttgaatattattatttcaagatctgtgaagaattaagccagtattttgatggggattgcattgagtctgttgattgcttttggcaaaattgccatttttactatgttgattctacctatccaagagcatgggagatctttccattttctagtatcttctttaattttcttctttagggactcaaagttcttgctatccaggtctttactcatttgtttagtgtttccccaagatattttatgctgtgtgtgctattgtaaaagagtgatgtttctctgatttctttctcagcctatttatcatctgtatatagtagggctactaaatttttttgagttaatcttgtatcctgctgctttgctaaaggtgttcatcagtcaactgggaactcttacatctctttattatttttaacttaatagtaattgctaattccaaaatatttacaaacattttacagttgaaaatctgcacctcagaggtgttaaatctttccttgataaatcaacaaagtctggtatacaaattgatactaagtctgtccccactgtttcaaggctgagcaatgcatcccaccagatgaagtgggctccaaaaaggcaattcatgaccccaggatagatcctggttctactcccaaggactgtacaaccaatcaagccacatagctgtcatccataattcaggttccccaactgttggtccatagtccctgagccctcactagctcaactcagccatctccccatcatgcattgttcatagcatccctcctcccaatcttcaactgaactctaggagctcatccaagtgcttatttgtgggtcactgcatctgtttccataagttaatgattaaagtggaagacctgtttagacaccctctctggtattactaggagtcttacctggggtcatccctgtggattcctaggaatttctctagcaccaaactttaccctaaccccataatggctcattttgtcaagatatgtccttcatatcttccccttcatggcttccccttcatccctcccccaactcagtcatcttgatgcctcatgttcccatccctatcccctcccttttacctcccctcccagtttattcatgagatcttaactcttttctcttcctggggccctccatgtgtgtccctctttgggtcccccgttttacccaacttctcctgggctgtgtattgtaccttggttttccttttctttatgtctaatatcaaattatgagttagtacacactgtgtttgtctttctgggtctggattacctcacttgggagagttttctctagttccttcttttgcctgcaaatttcatgatgtccttgttgttttaccactgagtagtagtccactgtataaatgtaccacattttctttatccattctttggttgagttgcatctaggttgttttcagtttctggctattacaaataaccctgttatgaacatggttgagcaaatgtccttgtggtatgattgtgcatcctttgggcatatgcccaacagtgatattactgggtcttgaggtaaattgattcccaatttcctgagaaaccaccataatgatttccaaagttgttgttgaagttcatctgttgtagatgtttggatccccagaaacaacatcactcagtatatccacaaagatcacttacataatgtcaaagtgtgaaacagaccagtgctcctttctcactccacaattcaacatgactggactcctggtgatctattcatcacctgagagggcagatttcagcaacacaactttcttttcaattattagaattattacagatgtgctatatttcctttgtctcatttcttgagtatgccctctcattcccccactgatcacaatcatcctagtgaataaggttggttgtacagcaggtcttccacccaggttgaatattcctctcctggagttctagtcatcctttgctcttcctacctcagcatacccattctgatatccctcccctcccagtttatccagtttgttctgtactttctaagatttttcagactttgaattcgtagatgaaaagcacttggttaaattgttcaccattaaaacgctgtactcatcacagcaaatatttgaagtaagtttaacatatcagcatattaaaaaccccaaaattgtagaataatttatacacttagaaattgaaagaggcatatttttttttatttaatgtgattctatttgttcaagactccatgaaagttctcgtgaagggacataaacaattccttttctcttgactacaataaaaagggaaaaggaattggttttgtctactttaatttcatcacatataagagatgcagccatgttttactggaagacattctgcctaaggaagtactatccagcagaagctagaagtaaactgaaaattcagatgttgtgcttctatcatccctgcttctaatgtgatctgtggtcacttagtattcttcaaatagatattccatgttttaaaactaagcatatgcataatggcatgttagctttacagaggcaactacaagatttgaatatggcttgatgtatgaccttggaaagaaagttccttatttaccttattttttctttttcagcaaaacagtttaacaatatctatatagaaaacattttgagcactacataggaatatagtttatgaactgcatattcatgtataaataagaaataaatgaactcattttccttggagctggggagaagtcccaatgtttgagaatatttaatgtttctccagaggactcatattcagttaccaacatccacatcaggctcataacagcctggaactccagctcaaggagaactgacatatttttcaggtccacacagacacccccacatacatgtggcatacgctcacagagaaacacacatacacacattctttaaaagtttttaaacttgtatgtcctaaaatacttgaaatcttcaaaattatagtactgactgagtaaaaatatgttcttctatagtgtaaaatagtggattaatataggatgatggaatcatatgtataactattacatttattatcagaatctataataaagaaaattatatatgctaatatacaatttgtatattcataagtatgtgtatcttttgataatcggtgacatatatatatataatgttcaaatatatatatatatatacatattcatatatagcagtaagagcatttacttatactttctaagcttaataagcacactatatgcatatctattactagagtagtaaatatattttatttccatgtgactatatttgcttatttgctattataatcttttagataccaagattgatgtttaatcatttttgaagttttgtggaactatctgccttatacctattaaattaattttctcatcacatcttttacttcccatgaattcaacacaacctctaatttaatatttaactagtcttgctatgttccataagtgatgttgaactcattatttagtttacactggccttcacttgcaatgattactctgcctcagcctcacaaaggctgggaatatttgtgtcaatatttgtggctctgaattttcatgtgttttccttttctatataaaatctggtggtgcaaaaatataaatgattgaaccgtaaattccttagacatcatcacttaagtcaggctaattttattaatttatgaaaaaggaaacaattggcaatcattggttttctttgcagatgcacaattttacatgattaaaactttggttaattggtatattctatggattcctgcatccacaattgcagaatctgtaatataacacagttggaaaatgtgagaaggtgttctccttcctcctgtaggaataattgagactcccactaatattacacactagaagctttcaccttaaggaggcatctggcatttcaagtgctggattcccaaagattgcacatctccctacattcatgtttagaaagggtcacctccagaacagtgactgagggtcagaatttgtagtaaactaacctggaatttccaatgacaccccggcatcaccatgccttttaatacctttgcttttcttaccagaggaaacacctaatcagctcttcttggtcacaaatgttgtaagtatgctaggttagctaaaaagaaggtatcctaatcaaagaattccttccagttacaatgtttagcttactaatagggaatataagtatccaaactctgtttcccaattctataaatacaaccacaccctttgtgatatcacatcattgtttttatgtagatgtgctccttttagagttgcttttaatgagacattaaagatgtcacatgtattatgcttcccagttattgtataccataaaaacgtagactagattccacaaaaccttttacatatataaaaccaaaatcgttattacgttaagacagcataagataatgacactttaaaggtagttctaaaaaccaaatagtagatttctctaaatgtggtagttgcataggcacagagcaattaaatacatgtgattttttttgctgttctgcaccttgtcagttctattaaaaaaggacgtaacatatttctctgatattgctcttcattattctagagatgtcactttttagacgtcttagtatatgtaacaagaaatctatagcattctgcaagttgtaagaagggtttggataacaaaatgaaaagcatttacagtgttgttttgcttcctgaggcatcattctactcagacatcatctcagttggcactattctgccccagttgagggcacacattggtgcctcctgtcttttctcaattgcttagaacctgtatataaaatctccttggtgacaaaaacaaacatatcacatagtgtttagtttttgttctttttggaaaatttttatgcatcttatcattctgctactgccctataggtattcttgcctgccaattatcacagatgtttaagcagaagtcaacaccaagctagtgcactggcttctgtcatgttccatgtatgaggaagaagtttaaaaatgcaaaaaagtaacttacaagttctgttgaaatatagtgtaagactgttgagtgattagatataaatgcctgaagaaataatgcaagacaacttgctaggaattaaatattgcaggtgtttatgttgcagaacatacaacaatgtcaagaacatttatgactatgatcattggtgcagtgagcttagctggtacagcacatgcagcatagtctttggacaagttattttaaaattgagattaagttctgatcatcagagaagtaaccatttttattcatgtgtgatgatttcatgctcctagccatgacactgtgagatcatcttccaaaccacccacaacacactttataaatgttatttccaggaaattgaggacattatcagtttgacttctttttaactccaatgcatgctttttcatcaaaccatatttatttcccaaaagagcaaataaacttttctttaattctgaaaaaaatcgattatgaaaaatttaccattttcctatacaaacatgatatttattttccctcacgttaatgtaatttgacttcaaataatgtgtgacaaaatacatcaacctcctcagaacacagaactagtaatggtaaataaaacttctactgcttgctgcttgattatcaaatgtcaagttttcttgtgatactgtaccacactgtttatcttttccttgcactgtgatttagaggttgttaatattcctacttaccaatcaaagtcataatgaagtaacaaggtttaatttcattttctgagagaactaagctacagagcgacctttatggaaattaagaaaaatactggagtcaaatactgttgacataaactgaatttctaagccagtgaatgtctatatgaggagtgtacacaatgtctgtatgtctgtgtatggtggaaatccccatgagtggacagaaaatatttgagagaactaaatactctttcatacagaactatttttgaagttacgttcacgggagtaagtccttcaccagaagctgtgcataggtcagttgtagttacatattttagattgaggataaccgtgaatttctagtgaaaccatggagcatagtcaaaaccaatgaatttctaggtcttaaaacatgtttcagtagaatttgattttacaatgacatgcttacagctgatttgtataattctggacattatcttataaagaacaagcacactggatgaagctgttacagaaccacaaactcctttttgatggacctgttaaactctgatttttctgcacaatgtgacaccggagccctcatttgcttcttaaatttgcagctggctcatgcaaaataagccattttgcagcccatctgttgtaaggaagaaatctgtgacagagcagagctctgacctgtgctactttatcacttgggttgcaatttctaaatagatttcaaaaataatgatgttcagtttctacttttagataccagtgagataacacctgtctagacagatggtctttggactgtgaaactaaagacagctgagaagcagaaaaatcaagttggcgactagtgtgaaaccattagaatctcttgtggaaaccttttagttctgaaaaacactttctattaaagacctttggggaaacgtgaacatgctctcaataggaggtggaatccaaagaagtgacaactaaacctgcataaataaaatattagagacacccagcattgtgttaaaacacttcattgtttaactaatactttacactaagtcattaaggtgaattcagccttccttcagataatggtatcaatttgtttaggaaaatttctagcaagagattgattttctttttattgtctcctgtggcctgctgaccccatcagggagttctttccaccggttgtgctagtaagtctactaagtaataaaagtgctgtggttatttcaaggaactgaaactcatccacaaccatctcagtttgtctcaccattttactgactgattttgttaaatatgatcctcccaagtaacttgtgttgctcttcatgaatagcattacagtcatggtggaaacttatctctccttattcactattgagtcctaaccattcatcagtaaggatgttggtttatgtgctttctaacaaaaagaaatgaactcacatggtattgttgaaggcacacatggcaaatgtactagatttgaccaggtagatgttggttaatcatatagttggcaaaaaactattttttttcctttcaggaactagcagtgtaaacaaagtgtacaaagttcttcatttctaaacccaatccaaacatcaggtttaatatatattaagatcagatgcatgtttttttctcagaaaacaatgagaaatttgtataattgcatatatgtaatacattcaagtaaaactaattgatgcaatttcctagatattttgcttatattttatgcagatttttatatctaccttccactctcaaattctcctctgaatgtgaaaacttaacttttaccttatgcttgtaaatttttcaactctaaaagaaatatactgaacaacttaaattatgaattttttatgtggacaaatgattctcatcaaaaatattatgtaaacatttctctgaaaataaatatttttctttaatcattatttataattgtaagcatattgataattaattgtttataaaatacatagaaataactcaaagtttctggcactgattcactcataatgcaatactattcttttagcaaatcagcattttaagaaatatatcatttctgtgtagatatgtagacaatgtataactctaataaatataggacactattagtaattttatttgaaagttctttaaatatcttaaaattttctgagtcattttggttacaattaagacataccaataaaatgtaaaaagttaaattagcaaaaataatacttaaatgtatgaaatatgtggtactatatcgctatttttgtttttacatatttttcattactagttggatctatgtcctctctttgtttcttttacttggttctcattttattgattagcaatgactttgagaaatctttacacaagtgaatgctatgaaacattccacatgtatttcaaagagttccacagtaaatccagaatatgttacacctgggtaaaaagattaacaggctcctcactgagcacagaagatgacacttggatgaaaatgttttcaaaggatttactctacatatttctctgaatattttgttgttaataattaaattgaattcaataaaggtggttctaaatataaatgtatagtacatatatgcacacataaatatttactacatcctatgttccaataagcataggatacagtaactcataacatttagtacactatgaacacatacacaaaattctctagtggcttggtaactcccagaaaataagaaatcctttctaatgaaggttctaaattgagacaagcaatctatttgaaatagtcttaaaatcattacttataaaacatatcataaagaaagctatagtttatcataaaataaatgtaagcctagataaatactcttcaagtatttgagatagtgagaaaataacaagtcacctgcacttttgagtagaatgaaaattataattcctcagtgaaaaaaattgttctgattgtgattgtgtgtgtgtgtgcacacatgtgcgtgctcaacatcaactactacaaaacaattatagccagggtctgaacaagcaatgcagagattaatcctacttccaatcctgaagtcttgaattactttgagggaagacatgaaatgatgcctatggaaaacttaaaacctgtacagcagcaaacaacctcatgacatcatttattttattttttctttgaaagatttatacatgtatcttggtcatatctcatccccaattctgccttccccataataataatgttatgaaacactagtctctggacatgtcatggccactatacatgcactcacaatagctgtgtttgcctgcccaaggcaagaacaagatatagtgcgttaaaaattccagcatagtggagggtgatctcaatattccacccattgctgaggggcaccacttgtattctgcatcattatttaaaaaatagattcacatgaacacttttcccacgttagacagttgttttaaattttaagtgcacgaaatttatagttttccttttacgagagtcagaaacatcacctgccacccaagtcacaccactattttgtattcagtacactctggcaggaacacaggaaattatatagaaatagaccaattttatttcatattagagactttttactaattgcaatagcttttttatcggcaatcaattatttttcaaaaccaataaactttaatggacactgagatattttgtcacattattttcacagttggatgcacttatttaacccatagatagttttcaaaggaacaaaagcattttctgtgaagttactgtaagatgtaattcaactaaatcatccttgtttaaccattcatggaaattacagacagttcaaatatttatgttatctaaatacaaatgaatgaatagcattgcattatattaaagataattcacttctactgaatagatgaaaaatgaggtctagttacatgttgaaagtattataaatgcataatatttttgaaaaaatatattttgcaatactttatgtctttacttttaaaatcttcatggtactttactgcttacattataaagacagttaggccttccagccaatacttccctgtgttagagctccacttttgtgtgttgttggttcaccctcttcttacacagtccacattatcactgcatgttctcagctccaatctgtgctcatagacacatcagcatttagttttctgcactccacttaactagcctgatgataaggtatttttgtgttttatgccccacatatatcttaattgcaatggtctgcttttactccttcctgggtgattttagagtcatggttgatagtgcaaagcaaatgcaaatgtaaatacaggttcagatcatttgaaaacttccatctatgattaagataagatgattgtaagctccttggtttcatttttttttttaccattttgcattcttgtgggatctataacctcacctacatagagacaaaactaaaatattgagatatattgattgggaagatgagttagagcaccacaaatgtaaagaaacaaattaaatggtatacatgatttacataagcaaggcttgatttattttacattgaatttgaactctctttttaaaaatacatttcaatcatggccatgggcttttctgcacttgtgtaggaagttttaaacatgagaacaggtgcctgcagtcataaagaaggggtcagatgctccaaagctggagctgtaggctactatgatctctctgacagggatgatgggagttccaaacttgtgtcccatggaagatggcatgtccattattggctgatcatctctccagacattatgcatgatctttcttaagagtagcatctcaaactaccagaatacacttagatcaacaacattgacagttaaagaaattatataaaatttaagacagaattgtactcacaacctttacttttactaccacaaatctcctttgttactctgaagttgttatggtgctcagcatcaaatgaactcactaaattagtagcatgagacccttagtgattcatggaagaatgctggaaaaaaaccctgacatccccaacattctgccttgctgccaaacatgtgcctttagtacagcagctgttcttcctttaccattagagaccctctcactcttgtcttacacaagcttcatgtggcatggctgtcttgtcatgtctgctgcatgtgtaaactgtctaatcttttccaaatatcagtcatttgcttctctacacccctgttctgaccatgaagatattatccaaattcagaatagtaatcttactagaaactgcccttcttataccaagaaaaatgtagaattttttatttacttatttactcatttatgtctttagtatttttgagatattttgtaatttcaagttgctcataattatagtctatattcctttagactagatcaatggttgagatccaaattaatttaaattatacatggatgattctagctataatgacatactaatgagattaatcaataatgcattatattgacaataatggctattttgcttcccttatgctaattacaaatataatgctcagaagtatcgatgcctttaggatgttgaacagatagtcaaagaatgcacagtcttagtgctgatgaaggggtggcatttgacactacaattgtaaatgaaaaagtatatatactagcagtatttaatttggtataaagcattgatatcagaaatcttccacctgaattttaagtacctcacagtttgcaccattacattatttttaagtgagtcactgtgtatttagctcccatatgaagtgatgaagcacagcccttcaacaggaaaaccaaaaggcactggaataggggagacggagacaaacctttgcaacctctcatctaaagcttcagcgggataactgtgttcaccatggcctgtgttcacccttaacttgcctttgttggtaatttgaaatggaaacagaatggtgtgttattccaggaaagaatgtgagatgctctaagatcagtgttcattacaaagtgtacctaattttgtcactgtcattttttacaaagcccttatttgacatcattactgttctcatgtttgcaatttcatcaacttatcagattattttgtaatattgtgactgccaactataaatgaacaaccaaagattaaataataaaacaaaatcaaatagtaagtaacagcaacacatttctatctggcttgcaattggcattcggcgataaacaccacctttggattatgttctaggtctgacttgcagaagtacctccctggagctatattgatacattatttatgatttattagagcttgcctgaagattcagaaaagcaaagtcagccttaagatcaggttgtggtgacacacaccttcaattccacaggaagaagctaggaggtggtggtacactattttaaccctaggattccagattaagagacaggcagatctctctgaatccaaggccacccagatctacacaagagtgaatcaatctaaaagagaattatagctcacacctttaatcctaacattagggaaatatataagcaaggtcttagagaggcattcattctccacccatgctgaggaaaggttacagtctgaggctttttttctttttccaacgttttttattttttttttgtttgttttgttttgtttaatttgaattagaagcaggattgttttacactacaatcccagttcccttctcccacccgtcctcccctactaaaaccctatctatcacatatcctttctgctccccctggatggtgaggccttccatagagtgccatcagagtctattgtatcctttgggatagggcctaggcccatacctgtgtgagttggctcagggagtattcctctatatggaatgggctcccaaagtccacacctatgctagggataagtactgccttatgcttgtaaatttttcaactctaaaagaaatatactgaacaacttaaattatgaattttttatgtggacaaatgattctcatcaaaaatattatgtaaacatttctctgaaaataaatatttttctttaatcattatttataattgtaagcatattgataattaattgtttataaaatacatagaaataactcaaagtttctggcactgattcactcataatgcaatactatgcagttctgtgattagttgtgggtgtctggttctacttccaccagctgctggatgaaggctataggatggcatataagttagtcatcaatgatgagagcttgtggagacaggatcagcccattcagcctagggtagaggtaagaagctagtggccagctgctttgcttttctgatattctacttgaagcttgaaccctatttttcatgttatacagagccttacctacaagatgacactagggtgctatacttcttgtttaacttctttattttagtgtgctaggctaaattttaaaacaatgttgtagaattaaatttcattttgattcacgtgtattaggttttcattagacaaaatcatatacaatctaggataagcaaataaaatccccagagttcaaagtatttaagttttcaataagtaacttggtctagaacatcacttacacagaaatccaatatcaacaatttaacttccaattatacaaataatgagagcagataaaagtaaactagaagaccaattttcaaaatgaattctgaaattttcttattttagaaaagttaatttaaaaaaaagctcgctaagtactgggaaggatagtataaaactgtaaaataaaataactcataatcacaactatagacaattgttatcatgttttaaatattttctgatcataaatacaaatacaaaacaaaacaccaccatcgtatggtgtggctttattattaaattatttattacatataacttttagtatgggcagatgtaaataatttctcaacttaatcacttttgcataatcaatattgaaaataaagcaagtcatttaaaataatcaagttactagacaggaaaatagatggcaatttatcaagtactctaaccctgatactccctgcttacctgcaagcacattgttttcattttgcttgtttttataattttctttaagtagcactaatcaaaattaatttgaatcttaaattgtaatgagaaaaaatgatagtctcctcatcagtgatataaatttcattcccattctatataagataatagatgtgtaattgtcacacataagacagatacttaagaaatataaatagttctctataaacaatctgttgcatgtttgttgtatttcatactacttaaaacggactcagatttctaatatgaatagccaaaaggtgggtgcctttttattcttccccccacaatctctctctctctctctctctctctctctctctctctctctctctctctctgtcacacacatacacacacacacttacacacacgaccagttctcattttgtaacccatggtaaatcagggaatgatggcattgtgggcctgtgtcaccatgtgtggtactcaacaaacatgtcaaagattatcactaaagaagtgatggtgattcgatctgttgacacagttcttgaaatattgcagttctcactcagatatccttgatacaagattattattttcttttttatgcatttgctcaaatttctgtcagtggaattagagaatggttcttaacataccacttattgtatgctagaacctttaatttatatattattttattcataaatgctttatcaccagagggcatcaccttagtcttgagagaggtgttgaaactcagatatgtgcactagctcaccaatctcatccagccatgtgccctgttggttttcctccaccctctcctggctttgctgtaaccacacagggctgatccacctagctcgggttctgttgttcactctagcctccacccagtggagtggctatggttatagcagcacatttgctcaggtctatgtgagtcccctcttacactgagaagtgtctccatgtaatgtgactcttccatgatatctacccatcctacacattatcacttttaaaattgcttcctaatcatttatagaaactaaaacttgaaatactaaaatattccttttgtgaaaaaagcaaagtaatataccaagctattatagcgcttttattttgcaactgtgctgtacacaattttactgtttatctgaattttacttaagaaatatacttcaataatttgaagcaggcagattgttgctaatgagtatgtgctaataaaagttgttaacttatggtacttcacctgtgtaacactaaatgacctgcagtgtagaatgtgattaagtacaagtcattgtcatttgacactgagctttagtgtgcaatttgtaagttgtgaaaccttggaaaaccataggaatactttacttccctatctgagcagctactgtcctcatcatctaggatgaaggactgaatgctgatgagtttatctatgcaaagtgcttacaatgatgtagacttacctagagagaacatttcccatgttggagtaaatactgcaaattaataaagtttttgcagctatcactggaagttggtgacttgtcagtgatggtacccagttcttaacacaacacttatatggtagaagcagaaatttcaattaagaagcgtattgccattactgggctgagctcctggtgtccaattgtgaagagagaggagtgataatatgagctaatgggtcaagaacatgttgggaagacccacagagacagctgacctgagtaagagcaagtaagaactcactgaatccagactgacagctgaggaccctacagaggaccaaactaagccctctgaatattaatgagagttggaggcttaggcagtttaaggttgctggtagtggagccagtatttgtccatggtacatgaactggctttttagagcccattccctgtggagggatagcttgctcaacctagatacagtggggaggattttggttctgcaccaaatgatgtaacagactttgatgatcctctatggggtggggagatggtgctggaagtgggagggcaggagggagagggaactgggattggtgtgcagaataaaatttaaaaaaaaataaaaaagatagagttaccattaaaattatagactttttaacaaaaggctctatgttaatataatgttaataaagtccctggttaatttattaatactgcatgggatgttgaaggattttcagtaagtaaaactgttactataaggtatatgtattaagttttaaaaatcaggctattattactaatatcattgataataatgccaattatattaataaactatgtttaatgtgattttttgcaagttttcagcacagtattctacactcatttattatcaccaatgaccataaagaaaacatgtgattatctttcaattattttgtatattaataaaaaggcctcacctgtgaaagggaaagaaaacatgacaggaaagcagaagatgggattcttggaacaagaagtggaccagcaggatggagcagtgaggtgggatgggaacaagggaagatcagcaaagcaagatgttacaatgaagctcatgaattctatgctacttttgaaataacaaaccacaaaacaaatagcattaaagccagggaccgttgtatataactgagatatagcactgggcagtggaggcaagataatcctgaggtaaaggtcattcttagcttcacatgagttagttttctcattgatatgctaaacctagcctactacccagggttagtgaagtcatggtcttggagaagaacctacaaccaccactttagaaaaatcattataatttctaagttcattctaaacatttgtccttacaagtacagccctcattcctcattgaggaaaattctctgcaacagagaccattacagaaaaccacagccaatcgtagccataaaaccctgttccaatgcatagatctatgaaccaacccctacacccaaggctcagagaatatcacagaagagagataagaagtgcaggaggatcagggagtttgtggtgagaccacatctcctaataatgtcagaagttacaccagcaacatcctaccatcatgactgtccaaacaggagctgatcaaggacaacaacaatacacaaaccaaagtggattggggctttaggcaaaattaaaatacaaggaacaagactagattttgaagggtcatgtcaaaaaagaaaacaccaggacaatcagcacaaaattgttaagaagctcaaggcatttatggcttagtatgaagccacaccagacttctttgtgagcacaaggtctccatgtccttgcaatggaactggggtatcacaagggaacctctatgaaaacaacggatttcggtatctcaattgaatactccttgctgttcaacagcctcgggcaataagtagagctggtatgcattttaaaacttgcagctttcactgaaaagacttcatctttattaatattgctaggaaacaacatcaaacaaggagtcatatttcttagtggaagacacaaaggcactccagcccctagaggaggtgtaaggagcactggagagaggtggcatgcagtcacccttgtgagggcactgcagtacaacataggattttaggtccttcctactttatttacatcaactctctctgtgtttgtatatcccaagtcctcaaatcctgtttgtcacagtgtccaagcacctcacattatgtgggatttacaagaccttctcaatatttttattttatgagtaaataaatgatccagggaagaatcatgatgcattgtaaatcattttacttacatagtaaagcaagaacactgtggaaagagttggaacttgtctcacacagctcaagcatgctcctattcctggtagtgtctgagctgattgtctgcagactgctctgacatttggatctgatgctttctgattctaagttcatgaaatattgacaatggagaacctcagaatccaggtcataaaatctctttcctacttcttgtgtgttcctaggcttccattctcaatatgcaaaatgtgaacttaattaatgacctaggatacctctctggtgtttttgctatgggattatggttcttcatatgtggaaggtagcagaagctgtctgtcacactgctagcatgttaccgtgcccacagttattagcactgctccctctttttaatcagacctgtctcaaaccccaatttcactttatgatttcatttcactgtctccaccaacataaaactgccttctctctaattaataaatatgtgttcctggagtgtggaactattacatttcctatgacacatttaatgaagtagcagatgaaataattcatactctggataatgcttaaatatttacttcaaatttacatttaacatgtacattcttatctgttcatttaattgatttctctgaataaggataaacatttttatatgtttgtttcttcctttacatattttaacatgtaagcacaatgtgaacaaagtagtttcatgagattatgtagcactgatatctgtgtctaagtcaagttaagcaaagtattgaaaaacaatacaaaaatctgtacttgagacaaattattattagaatattcaaactacttcaaaagaactgagtcaagaaatcagagcaaaaatacagggacaaaatggtccaccttgattttggacattgtgagattacttaaactcataatccaaatttcttcatcagacagtagaagagagtatttgtatctaacttccagtgagaaagtaaaatgagagcacaagtgtaaaaacaaatatgtacaagcatacacataatataaacatattttaactacaaataaatctttctatttaaatagtaaaacctcataataaatataacatttaatatacataaaactgtatagtgtatgcattcaaatatttaaaataaatattaacataagcttatatgagttttctcactatccaaatattgtcactaaataagcaaattgtgttaattccacgtaacacattttcctgcttgaataagccaatggtcattttttttctcacagaaagctctgagacctggaagaaaaagtgaataaatttgggtataggagactttcaaacttcacaatggtaaattacatgaaatgaaatacaattgtgagtcacgtgacttcatagtgatggactgacagaacattacttccccactcatgcttgaacttcctcagcagctactttttccaactggcatgaaaatacttgaactctgtcataattatggtcctatttgacttatttctgtctaattttgtatggacttgataaattatattttgaggacatcatagaaatttattttaatgaggataatttgaatatttagttgtttgaaagaaattctaattatttaaaagacaaaaataagatttagaaagtgctaaggcattttaatataatgattactaaaatttgaaggtattgtactctctaaaactaaacttgactttaacacaattctatcaattcactgaaaattcagaatttctcaaataagttgaaaaaagtcagcttaggaatagaagttaagaagtaaacatcaatcattttaaacatgctaaaacagaagaaaattcaatagggaaaacccaatgttctgaaaaaaattacattatgtaaaaaaaattcatttaaactaagtccagagtaagtaattccacagataccatttgtctgctcttctgcattgagcagtagaagtttatcgggccccctccatgttgtaggcagcctatgctctggaaagcgttaacagtagtcatgcagaggctgggccttggattgctaggaaacaaacagaaacgtctacacagagcttaagcaaacaatgtgcagagttgacagaagcaggtctagaaatccactaatcagaaggttccacgatgagtattagtgtgatggttctcaagattgtgtaacgttgacctacacacaggaagtggcagcatcctgatattgacatgggtatgtatgaaagaccacaatcttttcaggttaaaggtaactcatgtatttggtggagaaacaaaacccagacgactaggcgttgaggaaacttctttgcaaactaaatatctcaaggcattgatgaagacattctatcatataggctttcatgtttttggacaagaggatagcacccggaaaggaatgctgcaaattattaaaatagtaactatttatttgtctgtagataaactctgaactcctctctagagaccattgtctgtacatagccaggaagaaaccaaggccaggaggattaacagttcacatcactttagttcactcaccatccttattttttacacaaatatattgcccagttgtgtaagttatgcattttgctattatcactttctgtattactataaaattccaatccttaagtcctctgttgaaagttttggatcaacattaaagaacatggttgagaaagaagagtcaacctaactcaaagcaaaaactcaaggaagccaaagatcattaatgtttcaatccttgggactggagtacaagaaatctccggtttctggatcaatagcctttatagtctttgtgatcaaagctatcacaacaagcaactgagggatgaaggatcttatctggcacctaggtggaggtgccacaggccacctgatatggaaggccttgtggtggaggctcttagcagagggagagagaggtttcttcacatctcagtggatcagagagcagatagctcaggctgaaaccaagatagagctataaaccataaataataattaacacagtcaactaagtctgcaaagatccacagcttcccagaacagcagttccatgtgtgagcccgtgagtggatatttcctattgaatatgtaagtttgtgaacaagatgagttaacattatgtataatatttcaagtaccactggacagtagagaaagaatccactaggatgtacagcaagagcatgtggctattgtggttttaaacttgggaaaaagatgcaagtgtgcatgtgccaatgacagatgagatttttaacagaaataatacaggaaatggcgaaggaacactagaaatgtccaaactttaaaaatgagagtggtgaaaaaccacacagtaatgcaagaagaaggaagaagctgtcataggcgtaaagctaccaggatgattgatggataatattggtaccaagtttctgtctgtgtctgtataatattttcttttgcaataatggtcattgttatagtatctttcattttcattttttaaatttttatagatttttaaaaagcttgatgtaaattttgaattatattcactcaaaatgataaaattcccaattaatcactaggaagacttggatatgtttcactccctgccacgtaccaaatatagaatgttatagcagcttttcactgattttattatatatttattttattttaaattttcttaatataattttaatatatgtacaatattcatcatttatttcaataaaacattcacatttcttgaatagtgcattttagatgttgtcttgtctttcctttgggaaatattcttagtgtgtcttttatagtagaaagacattagtgaacctaaagttcactgttactgtgggtgtttgaaaatgcattaatttttgtttccctgctacagttggctcattatattggtttctaaaaattatgggtgtgaaatgattgtactatgtatgaatttcaaaccctttaagaggctcacactaacatctatgtattgaaatatttttttctgtttttcttttatttgcagggtgtgtgtgtgtgtgtgtgtgtgtgtgtgtgtgtgtgtgtgtgtaagaacatggacataggctgagagagtcagtgtcctgtcttacagtggtttctgtgaaatactgcagttggaaggatcaatgaggaggtatgatgtcatcctgataccatccttctgttatgatgattgacacttccgaagaacacacagtgctgatattttgttccttagttacacattaattgaagttatggaaacaaattagatcaagtttcctgggaaaatagagaaagcattatgaaagttcctgtgagggggagaaggagaactgagaaatatttcttatgcatctgtcaatgctttatgcttattgaagtgaggatatttctttgttaaattaatgaggtggcagcttcccagttaattctagagttccactcaataaaagcactgaacatattgaagagattgcaagaagggaatttatatccttgaaaagccagcctttccattttgttgagaaatgatgaagagcatatgttatagtaattgaaaaagaaaagtgcagaggaatgttttgtttgcaaatattttaaaattatggcatggtttactgtttatattttaaacaatcacatagacatttgaaaaacaaaaaaattctattttagtatatactacagaattcaacaactccaccaatatccatacctacatctagatgcttgtcttttgaaagagacatttgactttccaagaatacatggtaaatatgtgtctttgttcctaaaaagaactctgaagttgtctaaaaagacaattttttttccgttagtacaggttattcatgctatcaatagtcttatatgtctacttgctgcctattgtctctagtctacaccataactatatccttctcaaacacatatatacacttgactttaaagagtgcctttaaagggctggtttccagccagcacttttccttttctttcactttcctttccttttctttattttttctcatatatctagtccctgcccctcagctccctccttttctgttataatgcaaggataaattaacaatacagatcatttactgaacaatactgagaaattaacaatatgttaatatattcctattttgatcatggtcatttagctctgtcaagttaaaggaatcttttgtagttcttattgttttgctgtgcttaactcagagttttattttgtagtcctgactggcctggagctcactgaatagaccagggggagggtcttgaatcataaagatatgcctcttgagggctaagattattcaccatcataccaggctgtttttacggctctgatgagaaacatgtgtaaagtatcccctcacaatgaataaacaagcaaattaaaacacattaaaatcctctccctcttttatgtaggtcacatctgagacattacaacttggccagagttttaaatcacctcatgtttaagagtcaacatcctgaagaccaggccctaaagtaaagtgtcaacgatgaaacaaaccttggaatttgctgaaaagccacaccactggttcctgtagcataaaataaactacttttagagtgttgtattttcatatgaatgttgtaattgtaagcaactatatgctttagtctttgagctataagcaaagagtcctctgttcccatctgcaaaaacttcaagcacagaagaaaatgtggcaacaaagacaagtgctttcttaatttttcccccatcttggatgtaggtatatctaagcagaaatggtggcagcaaaacaagaggtcataggtcctgggtgaccacctgggttcaccatctgaaccatgtcttacaggatgagttgtattacaggaaactgacaagggtgattaagggctttatggtcagagagggctgcattcaggcaaagaagtgtgaaacagaataacaccttcaaggaccttaagttaatttgtttgggctcaaggataaagctccaagaggaaggagctcataaatcaagtgagaaatgtaggcaatgaatacatcactagctatttatgttctgtatttttctgcaattaaaatgtaagggctcttagagcagaggccatctttccaagatcttaatgattctgaacattctgcattttatcccatatcctggaactattcttaaaaggtgcactcattcttggtgtagacaaaataataatttaatattccctcattttgtttgatatacaacctaatattataaagtgtattttataattcttcctaattttcatggatctgttcagtcaatcatctacatacaaagaattggtatagcttaaggggtgatttttacatagcattttacaatatgtaagaaaatttagtttcaagtgtcagagtgaatcctaggactgtgtttttcaaaatttcctttagaaatctgtttcaatttcactaggtatataaatatttctcaaaccaaaattcaccaaaagaaaatggtgactcttaactaaattcaaacacacagattaatttaatcaaggataaaaaaaaactattcaacttttcttgtttggagcaatatgccccatttcagatcaaccctaaatgttgaaattcaattagctttccatgatccccttgtcctcccctgaccaaaaatacatatgcatagtcctcaccaaatattcataaagtcagttaaacaagtgaaggcatgccaaactgtttttatatgcactttgttaaagtgatgaatactttaaatcagcatcataaactgacagggaaagcaaactttagtggagtgctagcaaagaaggggaaattggagcacacgctccctcactcacataagtgctgctgaagagaagaggaaagggaaacacccagggtattgacattgactaatctgctgaggacaggcaaaaaccataagaaagaattagccatcttaatttctgttaccaacagaaaccacaaagacatttaaaatgtgtatctctaaggactgctgcacaaaatattttaaaacatgtacccagaactcatggattttgtttttagtgggtcaagattatttccatacataattacttattttctgtagtgttattaaatattcataaaccaaagttttagcaaaaaataaatacataaaattgtcatctccattactatataagtgccaatggcattgtgtcataatttttgtcccttgggcaatgcaccatattacttttgttttaaatcttgattatttgttaaaccttctactctaacaatgttaacacggcaccatatcccaaatgccttctctaaaatgtctgaatgtgaggcttaggcaaaccacaaaagaccacaaaaactcaataccatcacgaagtttcatgaaatgcaatatgccagcccagcttttcctatctcttgaggacagaagagaaacaaattgcttgtggggcaccagagccattgtgtgccactcaattctaattggtaatctgtgtaaaaaatgtatgactacttcagttataagcagaaatataataaaataagctatccttagagaggagggggaaattacagacaatttgaagtagaaaaatccacaataggctacaattttcattctctgtgaaatactgaatcattttctctgatgactcttcatcagacccccatcagccctctcccctgccatctgccttgcaaaaaaggccatgcaggaatcccgggctgctaaataaaaaggaaataagatgctgcaccttcctcaggaaatgtcagaacaccttgttaccaatcacttactgtattagatataatccagttctatacttgcgaatgaatgcctgtgcagtgagggatacgaaacatccagaaatttgaagaagcagattatttgtagattttgcatttcaatgatcatgtttaacacattttagacaaaaaaagacaatacctttttaaagatggttttgttttgtttttgaaacattatttcacttttcagtctaggctggcccggactcactgtgtagtctaggctaatctgaatagtccagacaatgtcctaatttagctcccaaccacacttggctctgttttgtaagtttttcatctgtatctttgggagtgttaagtgaacactttgtgtttgtcattggtgggttgtggtatatgcttgtctatgtaagtacacgtgactcctgtgactctagtgtgtctacagggcagatatggattccagctgccttcctctatcgttgtctagtgtattgattgaaagagagaatgagtgaaacttgacatggctgtattttctagacagacagtacagcaatgtctctgttgctccaaagttagaatggcacaaagcccagttttacatggatgcttgggatctgaactgaggcactaaatgcaagagtggcaggcattctcctccctcagccatctccccatgaacaggaagtactttttctaccaatagtaattgtggtctcaaagtaaagcatgtcttaatttgaataagaaaggtgacttcaatcacaaatgtgaagtcaagtacatggcatacatcacaaatggcatgcaatttaacttcagggcagaaaaagtttttaatagtatatccatttcactgtagatattttaaaaaatgtattaaagataaatacacaatgcatgcaacataagtctttagttgctaatatacttttaatctgaagctagagtttttattttctgatcatatggtgttttatgacaattcccctagtagttgacagcatacattaaatggaaataaggggataaatctgctaaataaataatattcatagacaatattaacaggaaacattcttttggttctagaaggcagaggattattacaatttttcttctaggattctacagctttgaagtaggctcacaccgatacattgtttccaaactcacattttttataatttgttttcaccagcatgtaagtctcaatttagatcatgaccaactaaacatatctacctttacttaaaatagatttaaaatacaaaagtaacatttctgctatttgtattttaattacttgtttaagttgaattttgggctattttctctacttactgtttgtatgtattcttaaacacattggtgatttatataaatgcacccctaattttattagacctacacatgaaacaaatacactagccacatatgtatgtgtatatgtactaattaagaataatttcatcctctttggttccagggaaaaagtgatcttcaaggatgttatgaaagaacttgaaccaaatctttgcagtttattgacgtgctttgctcgaggctgcaagaacaatgaataatacatgaagttcagactctgcagcatccctgtgctgtacacctctgagtgttccttgtacatgtgtagagaggcttgaatcttcattggtatgcagacagcatgttgcagagaagttgctctatcttcactgaattttgttttgacacatgtgctttgtgtcacctattcattgcagtccagaaacacaaacatttttctggtgagcattgtgcccctgggatgatgagcattgtgcccccaggcatatgtctggtcttatcttctccatctctaatggatcccccggttcagggtagaaatcaaagtgattcttgttgaagatcattgcactagagagcacactgtgaaggttctctcaaatgtactcattttaaatactggattggagccttagaaaaccacaagctagatgctgggatttaacttgagtaatagcaaaactcagtgtaaaaaaagaccaaaaatgtatgtgatagcaagaactatgagaaatctttcttcccagaagagagatcaacaggtaaggaagagctcaagtccctaagcctgtgaaaactagagagccaagagggatatcaagatttcaactagagaagaacaaactgttgacctaaacatgcggcccctgtctatactggcactcatcacctgctttgaaggagtaagatcacaaaattagtcacttttgccaatcacattctcatcctcatgacatttttcctttctgatactttggtatagattttctgacatggaacacaggtggcttgagttaaggaccagggttcttatgaggacttgtgttttatttttcttcaaaagaaaacacaattttggaaacgtgcaaattctgaagttctgtacaagcaaactctcctttaataatccccacatacactctcacagtttccttagcaaactaatgttccctggtgctaccttccaaattacttctggccttcactgctaaatgttgtcaggtttgttgtcgctaataataaattttctcattttcaacttcattttggatcacactatacacatagactatctttttctcatttatcaagtgcgttctgagtcttaaaatttttattatatatttattatttcaacataaaataacatccaccaatgatattatctcattctaacttttcatttactgaaaggttttaagtaataaattcaatttctttgataaatataaaacttttaaattatctcctttccttgtgagataattttaataattgtgttttcaaaatttgtcatttatctatgttggaaaaatttacagtacaaccatcaaaattgactctatttacaaagacctcggtgaagcacagctggcactggacaatcagcttcattgcctaaccagagctactgtgcatgcgctgctcgcctccccagagcctatcagagttgagagtgaggccgagctcctcaagaacactagtgatttccatgatcccctcctcatctccgcatctgtttctaatttattattagaatgtagctaatacttttagtttccttccttagttttcactccttctactcctgatttttgagaacctcattttgtgcattccccttgctaactgtgtggaatttcagcatgggaagtcaaggcaatgtcaagtgaggtgaacaagagcaagcttggagagagcattttgaaaccatctgtacattgtaattggtgtacttagaatgtactgatgtttaagaaatgaccactccagcataacaaaaaaggagattaaaatgctacatttgatatatcaagttcacccacataaagctttcatttaccaaattatcatgtctgtttccccctttgtcctatctctctattatttttcctctatttacatgagagtacctagaggtcctttgctaattgctgggaagattctgtctagagttactgtctggcctgttttacttttttcttttctgttttgcattcagtttcataaagcaaagaaaccagtttttaggaaaacatagttaacaaatttattaaatttaaaacgttacattgaagttccctggtgtgcaaatattccttgagtgtgtgctgcccagagaacagcaagggcagcccttaatggatccaattttatgcctgtggcaaataaattctcctccagtggccatctcctagcctgtcagcagagaggcaacctggagggagtaaggctgagtggcagggcagacctcatcagcagaagggaagttcagtccctcacacctcaggatattaagaagctaattaaatgtcccctgctgtagcaggaagcagcctgtgagtcccatcttaaccgctacactttctaaagcagaggttaacaattcctggaaaacaaggaatgcaaaaggataagaaactgggatttataaggaacattggactcaagttgtctcaattattttttatataaaccagttgggctgtttattgtaaaaagtaatatttactaacacctgatgtgtggcagttgctgacgtgggctgttaggaggtgaacctgtagaaatgctgaatttctgctctttagaaacttcacattgagtggagaaattgatttgtgaacaaaacctgcagaaaagggcagtccctagaaatagatagttataaggcagcatgcaaaagatgtacctcagaaccaacattgaaccatcaagcagtaagatctcgcctctgacaactgtgatttacaaatgaaaaagagtggatttcaggcatggctcagtgggtgagggagcttgctgtgaactctgatctggtccccagaacctccatggaagaaggacaaactggtccacagacgccaacccttcaaactcaaaacaaggaaacaaggaagcaaatacaaaatgataaatgcaaaataaaacaacaccctgaatttaattttcagttatccttcatctgctattctcttgaataattcccacttagttttcaaattcccttttgttccctaacaagagttgattctgtcattgccaaaagcatagttcttgactcaaaggaaagaggacttgtcatattctgtagccaaatatgaatggatatatatttagattactttgtatatcatgctgtaatttaataactattaaatgacatcttggtaataacagaagaaagaaatcataaaccaagacaccttgaatatattaatggatacattaggtagttgaggtctagaaaatcagggaaatctctgttccagaccctagagtctatctgatggcattcttaaactttggtgtagtgggagctagaagaatgtacatccccaaaggattgccttattagtcacaggacactacctgctgcatatacttgggcaagaagtgctattaagtgactaaagacagcccaagatcactttggcttccaaattgtaacattccaaattaatcaatctgtcctgtagaatgttcaagaaggatgcatctttgtttcaggtcacaacttcaagttaatataatttgctccagtaaataattacaaaattatctgttgccaagcatgacctgggaggacttgagactttaataccagagaatacactgattaggtagagcatcagctctgaaaataccagttttctatcacattgaagattttcagtttagcctaacagcaacccccgcctgtgtccacttcctacttctgggttcaaataggatcaaagtgagtctttgctatctatcttagatgatgccagttaaggaggaaggggagtacttagagtagagcacaggacaaagggttactaaaggtggaccagaaccatgatgtaccatttcatttgcataaactcctactgtagtctttaactttgttttctcttaggacagactgcgcacattcaaagtgattttcctaaaagccaacagtaaaagtgggatttttaaattaaaattctcctgcaactttttcagattttgagggtgtaacccttggcttccaaagattttgaaaacttgattttcaattgccccatttacccttcccccaaacctacaccctatgctcaaggcatttggctcttgaagccacaagtactttactcaggtgcttgtcatgcagccctgctcttgagcatccaggataggaaagaaagtctacatgcatttctccagctgaatgcctccccagcccttcccgcctatgtgaattatgaatgccccactcagatcccattgtgttcttagcatgccagggactaatcacattatgcagcaattgttgatttcctgtcatacctccttgtaggaaatttgtctcctagtgcctacaaggaaggaggcttggaagagtcattatgtaaatgctcaatggcttaactaatgactcaggatattagaattaggtttcctctaagatatcataaattatccaatatattcttttgacagagtataaatgaaaatccttttaagatttattttttatgtgtatatgcgtgcatatgcatgggttgatggtgggatatttacaagtgagtgcagaagccttaaaagccagactaggacactcctgagcttgtctgactcagagtctggatatctaagctagggcctctgaagagcagtatttgttcttaaccatctcttctgctccagaaattaaagtccaagtattaatgtaattttctgaaagtcatcagtaatgtatatagtaaattgcaatgctttttagtttttgttattcttttgtaaattcccttggatatttcctttcaatcctatactttcttgcctttatgacattttcctgcatttctctttgggccatttgtattgttgtatgtgtagcatcaatgacaaaaatgacactgaagacaatttattttctttaacctctgaagactattttagcttctgtgtagtaaatatagattgtctacacacattgcatatgtctccatgggcagagctgccaatcttcatctgaggagaacaaccagaaagaaggatgactgaatcttgctaagaggttggattacagagcatgagagctatggctgggacacagagacaaatgtgcatggactaccacttgtttcaggcctgagaacattgagaaattgcatttatgtactattaagaacttcttttaactacatttatcatttttatgtattgaagttatactttttaaaacagttacaaaggaaagaaaatttacccccaatttagattaaaaaaattaatgaagaaaatattatagaccttatcttgacttttcatttaatctgaactaacattatagatacttaacatgagtgaaaaaaaactaaaatacatattatacaaaatctattcttattatgcgtgcatatttaataaacaatatcttttggtatcattttatgtttgctcatgtgtcaaaacactagcaaatggataagactaggaaagtaataaaaactttaacaaaatgtacctttataattcaggacatttaacaagaacttttattgaatgatattatggggttaaaagtgtatatcaaatcacacatttaaaaaatgtggcccatgtggctctactcatcatattagtcacatataacaagaactacccccaaactaggctaattttgtgaaaatgggtccatatgtgtagactgcatgagtttcaaaattctatgtgacttttaaaagtttctggtaaaactatttggattttaggattcattttacctctatgcttaaggttacttaaatgttgtactacttactcattgctctgaaaaagtgcctgaagaaagtcaattaggaaaggaaagaatggtttgtattagctaatagtttgaagagatacagtccaccagtatagagaaggcacaatggccatggtgtcatgaagatgaggcagatgatcacacttcattcagaggcagaagcagagggagaagggtgcttctccctgtctttttctgtcttatgccctcaaggactccatctcagagcatgcccttgccattcaaggtaggattttctttaatggctaaccctttctggtagcatcccatggacatacttagatgtctgtcatctaagtgattacagatgtggtagttgacaatgaatattaagcattgtgcctggatgttgcaattaatgtagcccttcatgaagagagaacacaaggccatgatatctatcagtcattgtatttgatcacatgtcagttagatggtagaattatatggcatgttctacaaggacagagatttgtaggatcaaggatgttttcaatcatttaccatgcatgcaagaatactgtccttatcatccatcttattcattcttttttagatagctatcattgcaatttactaccaatataactttaaaataataactctacattgccagagataattcatgccaataacattgacaatttttgacatgattattgttaatttgtaggtttcctacttggtatggtactcattcttctacaaatatatgtattttatactatttctctgtatagaggtaaatagtctattacttgaattacttgaatatcagtaaaaatttgaaataaaagtttagtagtgttgttttattatgttctattgataacaataatatgcttttaatatactcactatataaagcaaaataaaaagagaaaaatttttactagacaattatcattaagtactatgatttacatcaagagcttcattgaaatgtaatatgtaagattaacacctttttgtattatatatgaagtgtaaatttatttcaatctatgaaagcagagacaaagccaaagaaaagtcccaagacaagattgacaccagagttcccatactttcatttggttttggcaggttacagaacatgagagacatacattaacctgatcgaaggtgactcccagaactaagatgtgtgcctaatgagcttcagctacacggggctgaggggaactacacagagcaatggtcagcatcagtatcctgtaactctacataacccagacaaggttaactaaaatgctaggagaaatgcaacagctaagaagcagcagagccaaattctgaatggagcccttgactgtagagtgaagatacttggcagtttttaattgtaatgtcagtagttggtttttattgcctgatctgtcccctttattgaaactctacaggaatcttgagattaagagttagattatacaattactaagaatatatgtaatggaataaaactgccctcacccaattcccaattcttgctattaagcaggcattcagagaacacactcagtgttttaaggctttgtttttcccacctgcataagaataataccctaagaacagaataactcctcctgactgtcagcacttagtctgactttagggttacaatgtgtggtatttctcatagttctggtaaaattaaaatttaaaattgcatacagttacgttctagctgctgtttattttcactctttcactagctatttatgtnnnnnnnnnnnnnnnnnnnnnnnnnnnnnnnnnnnnnnnnnnnnnnnnnnnnnnnnnnnnnnnnnnnnnnnnnnnnnnnnnnnnnnnnnnnnnnnnnnnnnnnnnnnnnnnnnnnnnnnnnnnnnnnnnnnnnnnnnnnnnnnnnnnnnnnnnnnnnnnnnnnnnnnnnnnnnnnnnnnnnnnnnnnnnnnnnnnnnnnnnnnnnnnnnnnnnnnnnnnnnnnnttatactcattagctgtagtaaacatacctgcctatttatttatttatttattttcaaaatatgctgtgatgcctgatgttgatgcttgactagatttcctctgcaatcaactaaacaacataccattgaccgtcctgtgatgaaaccggcaggaagagattcctgaggggccaccctcctccagaatggatggtatcttctttcaatatcctatttcttaatacaaaatggccacacaggaagacaatgttgtgtgttgcctgacttcacattttgttgatgtgtggcaatccctgttgctattgctgcccctgtgctgtctggcactgatctcatattacagcttctttgacttccaatgtggaaagactcagccctctaggagtattccaggtcttcagctcctgataagaacaactgagacactaagtttcttacacaaagagttactggatctcagtgtcttcaggatatagtcagccattcttagatcctccaagctctacaggctctaagccatcctgaaacgtccatatatacatacagttctgtttctttagaggtctttcctaacatacaggatataagtagtggtacaatgggcaaaataacttttccaaactgaaacactgtctgcatatttacaactgaatggtaacatatttccacctgaagtttgtcatctctggtattgaatagactgctatacagaaatggcaggtgaatatgttatatttaatatgccaacaactcacaattctccttttagagtttcataatgaaaactttttctctggttttgttgtcattttcaatataatatgatatccacgagacttagtaagatctactggagccacagtgtagataagaccacattcctgttttcttttttaaaaaattatattttaagcattcaattcattttagataccaaccacatttcccctcccttactcttctccagctccatccatccactcctcagaaagggcaaggcctcccatggggagccaacaaagcctggtacatcaatttgaggtaggacagagcccctcccttctgctctctacatcaaggctgaagaaaacatcccactataaggaacgggtgccaaaagccagctcatgctccagggatacatcttggtcccactacctgaagccccacaaacagaccaagccacacaactgtcacccacatgcagagggcctaaaaaataattttctttaaaattgtagtaattatttggctgatctttaataattcctaacaaagtttcatgggtctgtgtgtgtctgggtacgtgtgtgtgcaggtgtatgtgcatgtgtgcgtgcctatatgtgggtgcagtgcctggagatgccagaagagtgtgttgggcattgtgtttgcagacatgaaaatattactttctgcgtagatcctgtcaggagcatgagatgttcagaatctctgccattctatttatttaagataaagagcatctgaatgcttagaagagctcacctgagaagccacactctatgcacacagacttccttttcctaccacacctgtcaggtgccctaccccaggttgtttatgtctttatgtgctcagttgggttgagtcttattttcacttccacagctcccaaagtcttaacccattctgtccactcactgcccttcatttcctttgaccaaaactctgcttcccaaggcacaatttgtgagtcttttccatagaagaataagaatttctttatttgtgcgagctgtttacagaggaaaaacagtatggatcttcacagatgtcatgagtaatttcagccatcaggtcagactttattgtaaaaatagttagctatgaagtccctgaagtgtggtgccatgaaggtcagggagagaggaggattggcaccacctgcctcccccagtgtgtaaccagactttcatgtacacaaagctatataaccaaggagagagttaaaaaagaaatctcaggactggaggtgaggctatgagtttggggaagggtaatatgcagagaaggtagagtctgaaggaacacgtatgaatgtgaatatgactgtgtgttcttgtctaaaacattcttggggaaaagtagacaagtgttggcaatctctgttcatgcacactagcacctcaaactgattctgatcccagtttttgctttttcggatacaataccattgttgtggacagaaaagtcgaatttcactggttacatattttaaagaacaaagtcttaaaatcgagcacatcactgacgacacagtatctgaattctgcttttctgtgctgtatgacccagagtaaattgcttgtactgcttctatatagtgggaaaaaatccatatatcaatctcattttcctcttcctgtctgtgactaatcgaatcttctattaccacatcatcttaatactaatgatagggctggttataagccaattaattattaatcagaaaatggttatgtttcaactatgatggcttcagtcacttggattttagatctgtggtgtgtggactttctgtattctgtgggcttctaggattttagaataactttacatgtagtatgtatttcatcagtatatatgtatacatacagaaacatatataatctgaagttacagattttccttcaaaattttttaccagctatattatgttttcttcaactgcactgttataactttctgttgttataatatagaattagatttgttgtttgtattaggattaacacaataaaagttctttatttctggcccagtagcttatctacagctccataaatacccatattcatctgcatagaatgtaaactaatctttttctcttacataatgctaatcttacctaaaaatctaataatcctattctagcactaaaatgtaatatactaacgtaattataaatattcatttggcttatgtacagaacatacaacttactttcaaatcacatttgagtaataatactgatgatagaaagtatttaatacttataaaagagaggtgtatattggcagcttttttttcagatatttccatatatatcacctatgctaaatatatctgctttttaaatgcttgtataataaaatatattatgcaaaatatatcatgcaagattgtattatgtaaaataaactacataaaaactgtagatatgtaacatatattatgaaccatggtctctattgctaagtgcatttttgagcaactattatcatcagaaatcacatttcttaaaagcaacagtaatcttactgaaatttgcttcaggatagagtcaggtacatgagaaaatctgggtagatatagggtttcttaatgatcaaagaaaatgagcgcattggaactggtactcatgacattattattaatggcaggccatgagagtatggggatattaatagatgtattaatagagactggaagctcagtgcacatattgtaaatagcgtgttacaggaaagtcaataaagcttggcagccatgagtcttccaaagcttttagtgaaacatagggtgtgtgagtgtgacgagataatctcagaggtctaaggccgtaaatgtttttcatacaatgaaacctactttctttcaaaaactgcatgactaaaaggagaatatatatatnnnnnnnnnnnnnnnnnnnnnnnnnnnnnnnnnnnnnnnnnnnnnnnnnnnnnnnnnnnnnnnnnnnnnnnnnnnnnnnnnnnnnnnnnnnnnnnnnnnnnnnnnnnaattgcctaaaatatactgtattaattacgaacttgttttcatgctattaatgaagctgaataagaaacttcaactaggagggccaaggtacataatggatatgaaatgaagtcaacttttctctgttctaagcaatgatttaggcatttttcaaattagtttctctaataaataaggccaatatgatcaaaagaaaaatttactaatatggtccaccatcaattttataaataagtaatacataacaaagtattagttaacttgaacttatccagatacttaatgtcaaatgacaactgtctggtgctctatctctgaaagaaagatataaatgaaaaggaggaggcaaggtagaaaaaagagggaatggaaggaagagcaggaaacaatataggtgggaggaagggaagaagcaatggagggaaaataagagacagaaggtattaccagtgagcccaaggaagggagagaaaaggagagtggtgggagggaagagtcatctatgagttacattaagtgaacttgtgtctacaccaagcttttttcaaatgatccttcacttgagtaaatgtattcatcctaacacttctgttatgttcatgtttacatgtgttgctcataccattatatatgtggcagactataggtgatgacttgtgggccaacaattttatatgtatttggaaattgcttttaaaaagtggacattgtgttttatgatatcagaaggagctgtacattatccatctaatacagaaaatgacatttatctaaatccatagttctttgatgagagaatctaaagatagacccaggaaaataatttaccagtaacttgcatggcaaggagcttggaaagaaccagattgattgtatttaatttgtggtgtcgcttgctcatctaagctttcacttcctcatctgaatttcatgagagtcgcatgccaagctatttaatgaattatttttaaaaatctaatcaccaggataagacagctaattggtaggataatggaaaactaaggggtcatattttattttgtcttttaaaagccatataatgctgggtgcatatatttaagtatattatacatctcttcagtaatagaagggtgatttgctgggattttgttaatgtaaattagttaatttctaaacaatttccaaactcatcatctctcctggctctgtggtacctcgcccattcatatttcacccttccctacctgcttagatgactggaaatgtgccaatatttgattaatgacaatggagaaagactctggggcagataaagaaaatgagccaaatgggaagagcaggctcggaagggcaagggccggggtagagagagagactctaaaatccaaggctctgcaatggatggcttatgtgttctgaagcaaagattaaatcatagggcacaacatactatgtctgtgtagacaaggtcccagacttggaaaaatcctgtaacttcttactatgagaaaaaaagggaaaaaatactttgtatagccaatgttcaagaaaaatatgaagctataagatataacttcattattcctgtgtgtaagacatatacatacaaacataccaccaccactaaaaccaaacattaaacattgaaatactaacttgtcatatttccttagatgtctaattcttaactcaaatctcatttattaaaaactgagctttatttatttctaaatctatttccatttcttatggtgtcaattcaataaagagtccatttgctgagtggggaaatttaggtccatccatgaccactacctcaaacagaacattaacacagtatcacaagtttgtaaatgctacttcccaaatacattcagactcccacagcagttgctatcagtaagctgaggttctcagtacttgcttaggcattccaggtccattgtcaatgttattcagaccagtatcctttctcgttgttccaagcttcatagatgagccatagtggaaatagatagtaatgtggattagaatttaatctttgggttgagcagagaaaggcacctgctgtcaatcccaaatacctgagctcagtgtacaaagtattaggagagaactgacatccaaaagctgtccacagacctccaaatgaaagtcataacactgtgtgtgtgtgtgtgtgtgtgtgtgtgtgtgtgtgtgtgtgtgtaaactcacacatacaagatgaataaagtgcaatccacagccttatcccagattaaatttcaatgatttcccataatccccaacatttctttctgagttcctcttttttaactatcctcaatcaacataaaggctggcaagtactcaaggaaacttgccttgacattcttaggggagaatatccctctttgattgccagtttcctctatatagaatatctcatcacatctgcacagttaactgcctcaatgtatatatttgttgtcttagtttttctattctctcttccctaataaagtaaaatgcatctctgtttaagcatctctgacttattcatgagcacatttacagttatgttttattctttaaacatatatctgggatctctaccagaagtcagcactctttggctgtgtatattttccatttgttttattccattttgttttgacagaatcattttaagtgcctctcactgttcttgaactcatgatcttcctactacaacctccattgtgctaggattatgggtatgtgcctatctcttttctgacattctcttagaattaagaacaacatctggcaaaaaaaggacatgtttaaatatttactgagtgggatgatgatgcttcttaaatagaagttttacttcagaaatatattcatggaaacagacttgatgaagttcttccatttctgcatgagtttctatgtgagtttaatttacatttcagaagctcaaatagcatactatatttctcatttcaaaataatcaaattatagcatttgttttaaaacaaaaaacaattcatgaagtctgtggacaataaaaacactttatagtattttatattaatattggactaaaataaactttcagaaatacctaaaaataaaaaccttgcaaacaaatgatgtgtgtgtgtgtgtgtgtgtgtgtgtgtgtgtgtgtgtgtgtgtgcgcacactcatctgtgtcttctctatgctcagactaagctcactgaacacacttaaaaacatgcatttttttgtagaatttgtcaagtgtttcaaaggcagggtgaccatcagccccatgaaatgacataatctaaggtatctgtggccatataaactgtgcttcttaaaactgttcatgcttgtcagtttactgacaagtaaaaatttggagtgaaggtattgacaacagtatgaaatctactctagcaaagttgacaatgaagagaaaaatgtggacttgattctaaccaaaatttctttcctaccaaagaaaagttgattccaaaatgaattccctcttacccatgtttacttgtaaggtgtttatatgcacagtgagccttgattatttgtcatgattctaatgtttccttacaaacaaaatttaaatcactgctaattcttagggactgtaatcatggacaccacactagaaaatatggctgtaagtttgtatgtatattctgttctagcagatagcccttataacagacatgtagctattattctatttaggatctcagcccaagggatgatgccaatcataccaagagagtgtcttccatgtccagttaaccattattgaaaaaactcagagacacacccaagggcatcccttatcttctaggtattcatcaatctcataaagttgacaacaaaaattgactatcacagtcactgaatatacataatatttaatataaggtacaacataaaaattaatagctctaagagggcttattgaaattcttaacagggaacatggaatcaataaaacagcagggcatatctataccaccaaagcatgaccaggaaaacatttgcaatgagaaagtgttttaagctattggacctttaaagcctaatacagaaagagaaaagggaaaacctgggggcaaaaaacaggcaagccttgaaattaaaaccaaagcaaatgagccaaaggcaagattccctgaagcctggatgatcaggttgaaggactagataaagcccaggagccaaacccattcaggctcagcagtgagttgaaagaaggccttgagggcagaactcactctgttggcaacttgagaatgggtgccttaagtttatatgcactaaggcctgaaatttaaaaagggtgggtagaaatcataaaaatattacagttttagtagtatggatgcttctggttggtaaaaagctggaggatgacaaacatttgaatgaggaccatagaactgatgggaaattatattctgaggaagagaacaaatgggactgcaagtgtgcagcagactttggtagtaaatgcattgagtttatgatagatgccaggaccaatgaacacattctttcagtgggtacatattaacacctactgactgatcttttttcacagtgccgaaagaataaagaaaatcagaataaattttactctgttaaattgatgctggattcgtaagtaaaattatggaaatctcatatccatttggcttaacatgaaattgtcatagcataatattacttgtggaggacaagggagattgtatttattcttatctcttaaagaataaacatctcaaatgcttcaaactgacagtgatgaggcattttgtgaggactgtgtaatctttcacagttattttagtttctaggaagacttcatcagccacagagcttagtggaaacaatgagtaccaccatttatatcattggttctctccatgcttaagaaattaaaaaggaaagtagtcctaaaggtaatatggtactctgctcagaggttttaaattctggagacaatgtcttaaataaatcttccaggtggttccaagtaaatactagtttgttattttaagtagactacttttccaaaagaatttagctcaagaagataaatttgcaagtaagttggttaaatatctttttgcagtctttcatcagccaagcattgcaagatattgacactgttgttggttattatctatcacttgagtgtaagaccttattgataattgaatcagacaaagtgaagaaaaaaaggtgctactgacatggaagtttaattcccgcttgctaatttttgtcatatgagatcatcctacacatactactggacagaaaaaagtcaaaaatcttacccagttgtgaaaactgagccacaatgatgactagcctgtcaaatatgcactttggtgctgtagtagcatgaatattatggaattaactaaccacttctcaatggatttatgggctgctccacaagagagagctcatgcctgttactgttatctgggccaaaagagttatgaatggttaggtaatatgatctagggaagaaatgattattatttagacataatgttaaaccaccacctaatgatgtactgttaaacatcattaatacataaattactacatctatcaatcttgatcagaaaagctggtctttgcagtagatggtaatggccacagagacccagaactagtcagtatgcaaagaataattgactatggtgcagaatacactcagtgagatgcctagatcccattcaaaaagcaatgtcagaagaaggctgaagccatcaccaacaacaaaaataacagaaactagaaatcactggtctttgatatcctttaatataatggtctcaattcacttatataaagacacgggctaacagattggatacaaaaccagaattcatccttctgctgcatgcaagaaacagacctcaacctcacagacatacattacctcagagtaaagggtttatcatagaaaaacccatcaagaggaaatttaagttctgaacatctatgcctcaaacacaaaggctccaacatttgtaaaagaaacactgctaaatctttagtcaccctttacaatagtcaccaattacataaaatatctttgggtagctctaaacaaacaagtgaaagaccttatgacaagaacttctagtctttagaaaaagaaattaaagaagatatcagaaaaaaatgtaaagatctcccatgttcttagatatgtaggatcaacatactaaaaatgacaatcctaccaaaagtaatctacagatttaatgcaatccccatcaaaatcccacttgaaagaacaatactcaacttcatatggaaaagcaaaaaaaaaaacccaggatagccaaaaatcctgtataataaaggatcatctgagggcatcaccatccctgactctagaactataataatgaaaacatacatgtggaacagtggaatcaaataaaataccctgatatcaacacacactcctatgaacacctaatttttgacaaagaagctaaaaatataaaatggaaaaaagaaaatatattcaccaaattgtgctggtataattggctgtcaacatgtagaagaatgcaaatagatccatatctatcaccatgcataaaactcaagtaaaaagggataaaaaacctcaatataaatccatctacactgaacctcatagaagagaaaattggaagtacatgtgaatgtataggcacaagagaccacatcctaaatagaacaccagtaacacaaacactgggagcaacaattaataaatgggactccctgaaactgagaagcttctgcaaagcaaataatagggtcaacaagacaaaaaggctccctatagaatgggaaatgatcttcaaccccacatccaacagaggactgatctcaaaaatatacaaagaactcaagaaactagacctaaaactatcaaataatctaatttttaaaatgggggtacagatctaaacagagaattttcaacagaacaatctcaaatggcagaaagacacttaagtaaatcttcaacatcctttgtcatcagagaaatgcaaatcaaaactactctgagattccatcttatactgatcagaatggctaagatcaaaaattccaatgacagtttgtgctggaaaggatatgtagaaagaggaacactcctccattgctggtggaagtacaaacttgtagagctgctgtggaaatcagtgtggcaatttctcaaaaaaattaggcatcaacctacctcaagaccctacaataccactattgggcatatgcatacaggagccacattcacagcacaagaacattttctcaactatgccatagaaatattatttataatagcccagatcttggaaacaacctagatgcccctcatctgaagaatggataaagaaaatgtggtatatttatacaatggagtgctactcagtggtaagaaacaatgacatactgaaattttcaggcaagtggacagaactagaaaaaaatcaacctgagggaggcaaccccaaaccagaaagacaaatatagtatgtactcactcataagtggataccagacataaagcaaactatacccagcctacaatccaactatacccagcctacaatccataaccacagagaagctagaacacttttccagaagcagatggaaacagatgtataaatccacaactaaccaatgggccaaactcctggagtacaatgaaagtgagggtggagcaataatatgaacaattttgttaagatcctgatggggaaattcacagaatcacagaatctgttgacctgagctaatgaaagattactgactcaggtcttccaaaagggttacttgcataagactgaactagactcccttattatagatgacaataatatgattgagacaatatatgaggccactggcagtggtccaagatctaacactaatgcacaaactgaattaatggagcagattctatatggagagataccttgctcagcttagacaccactatgtctaatagtggtggaggaggagagacgttccttggctctgcctcaataagatgataagacatactaagtagacttcctatggggaggccttaccttctctgaggagcaaatggtgggagggaggagtggggagagctggagaagaggagggtggggtaacttggagtgtaatgtacaaaataaatgattaaaaatactttaaaaataaaataaaatgaagtagctcaaagagagagagacagagacagagagacacagagagatagagatggagacagagactatcgtgtgtttgctgtaaataagacatctatatctcactccatccacataagtctcagggatcttcttaaaagttgtgctgaaaaaaattgtaaaacccaaaagtagtgactatctgcagtgaatcaggatttgcctggcacagcaaggcaactgcactcatcaactcatcgtgcattcctcagaactacacaagatcaaactagccgaaatcccaacacacactgaggagggacacatgccagactgaagactagataaaaaagtattgtcaattgatgtctttggagggagaagggttcttcaagtacttatcccctgagaggctatccaagctcgagtagatggtctgacacccatgtacatgtaggcagtaataagtgacctgagttaatttagaaaaaacaaaagcatatgaggttggaaggaaaagtagtggtggatggataggcaaataattgcaggagagaaaagtggatacatttgatcaaaacacaatatatgcatatatgacattctctaaaaataaaggaaataaataaatattattaccgttttaaatgatggactaggcagttatagccccatggctactacactacttagttttagggaaaaaaattcaactatattaggaaactattccttactctaaagttttcttgtataagacctaactatgatgcctacttgggcctccacctgtgatcctatgaccatcatgatgaaatgagttttatattaagcttattctgaatttccaatatgcttgttcacatgtttacttactacttttatgatcatgtgtttcattttgtcttcctgaagactggatgtggatcattttgcatgcttaggcaagtttttgaccactgagattcagtagatagtttatcatctttaaagtttttgtgtaagtggtgagacacttcattatttttattcacaaaagtgtggagtcattatagattttcttcattatctgtaagtggaaacttcaatgagacaacagtcataggaccttttatgtttatcactaaatctcactttacttggtgaatatttgccacatcccttctataaaatatttttctcagatattccttgctgttcctctaaaaattcaactcttgtagagatcatctttttacccaagtacaaagtcacacatatatatggaaattctaaaggaacaattaaataaagaaatccgcagactttgatgataatagaggagagccaacaattccgttgagacttcagacaagttgtggcttcactcacttcattccttgcccccagttctttgtgccttttctctagtagtctccaagacacagacacagacacagacacacacacacacacacacacacacacttttatgtttttatttaattattaactaaaaaaagtgtgtgtgcctggctatgtgtgtgtgggaatgtgcactatgactatgggaactcaaggaggccaaaagggttcatcatatctactggatgtggacatatgggaagttgtgacttaccggatatgtactaggatcagaactccaggtcctaagaaagagcagtgaaaaccctttaccaatgacctatctctccagcttaatttgtttttatttcatctgtgatttttgctggtactggaagtcaaaccacacacattgtgtatgctttatgagccatacacttagctcttttaacattatttacttaagcacaaatatactttcacaagggtaaaatagagtgactgtgggaattttaagagactttatatggagaaatattattcattttaaagtttaataaaataaaacttaacaaacaagcagtaatttctaaatgtcaatgactgttttcaatgggctgacgaagtaccaggaccataaaatttctttaaaatattctttgagcaaggcaaataaaaatgtagaaatttgaagcttttgcttagatgctcttaagctatagcgtaagattaatgactttatctttcaataattatttaaaaatttgaatttattttaattattaataattattctctccatagagagaatgtggaggtcagaggaaaacttgcaggagtcagttctgctctcccaccatgggaatcctgggaaccaaactcaagtttcaggcagcagtcattatacactgagccatcttgccagtccaaatgtttctattttgttagactttggctggatccatcaatttgggggcctgatggcccaaagtttcgttaaacattagaagccttctttatcacaaggaaagtctcttatggacaaactaaagactaagcataaagagaaacctggggccaagcgttggtggtgcaagcctttaacccagcatttgggaggcagaggcaggtggatatctgtgagtttgaggccagcttggtctccagagcgagtgccagaagaggctccaaagctacacagatacaccatctcgaaaaaaaaaaagaagagagagaaacctggataaacagataattctaagtacatatagagtcataactgaatccatcaaagttctgtaagcctaagttgacaatgctaatacaggaaagagaaaaatatagaaagacctttcaggagatttccacagtcctgtaagaactgaggtggatttagagaaagaaacgtatgttggacagaatctgcttggtgttactataatttctgtcctttgaaaatgggttgaacttaatttcaccccacagatatatgtgtccaatgaagtgggtcttttaaattttcaggcaataaattgtggaatattctacaaaaaatattaaggaatgctatattacagataagttgttttacaaactaaaagtaattttccatggctgcatgtgatgtaacagggactgtacataggagatgggaagagtagagcagaccatctgatgtgttctgttcctggcttgggccatcgctgtgtacataacatggacttagatgagatttaatttgtaatttccttcctaaatttaatttaatttgttataggtgtgtgtgtgtgtgtgtgtgtgtgtgtgtgtgtgtgtgttcatgcatgcannnnnnnnnnnnnnnnnnnnnnnnnnnnnnnnnnnnnnnnnnnnnnnnnnnnnnnnnnnnnnnnnnnnnnnnnnnnnnnnnnnnnnnnnnnnnnnnnnnnnnnnnnnnnnnnnnnnnnnnnnnnnnnnnnnnnnnnnnnnnnnnnnnnnnnnnnnnnnnnnnnnnnnnnnnnnnnnnnnnnnnnnnnnnnnnnnnnnnnnnntgtgtgtgtgtgtgtgtgtgtgtgtgtgtgtgtgtgtacgaagattagaagaaaaattttgataggttcttttttcttctatcatgtgttccaggggttgaactcacatgtcagagtgtgtggcaagaacttttacctagtgagtcaattttattgcactgatttagagtttctgtaactacagtatgtaattagtaattagattcaaaagttagaaaccatgactttttaatagctctatgggtagactggaagaattaaagaatgactggcaaagtttttttacttttcttaataagaagctcctccctgaattcgcaaaacctcagtctcgcttaccagatagtcctttgtgcatccacattgacccatggcactggtaaagcagaagcatgtttcaaaggtgagagagtaactaccctcactattcaaaacattctaattcactaaacacccgtacttttaaaatttttaaggtctttcacctattttgatcacccacttttatctactcatactgattatttcttctttgtccccatatacatgtatgcttaacatgcaatgttattgttacatctgtgcatgcaaatacataatcacatacaccccagggttgatggcccctcaatatcacctgtgctaacctgccatgttaagtgccatcactctgtccaaattcagaacctttgttacattttctcccctgagtgattcttcttccaatggcagttaaacccattgtgtgctttaagacagtcagcagctaacagtccccattccgctcacctcccactcttaacagtaagcattcctttctattattcttaagatccatcatggcagcctgcctgtggactgtatgcattgaaagctcatgtaccttagcaaaattatgaaaactcagatgattcaataaacgaaaggttagcacacagtaaacctaagtgaataaagataacgaataaagactaaatgagtgtgtttactgatgactaatcattgctataaagttttccatttcctctcattaaatgatacatgcacaattctccaaggaaatattttatttcctgtgcaatgatttccgcacaatacccagtacaaggctctaaacacagtgggcaatcaatacctgctgttgactgtggaagtaaaataaatttgcaaaactaagtcaggcttgtttcttgtaatagaactccccttagtgatttttggcatcctaaatgaaatcaccacaggaaagtttatgaatgatgtgctgaatgctgcggatgaatgccatattttcagatgtaacactagtgggtgaactagttctagatagtgaaaaccatgtaaatatcaaaaggtagaaatatccatgtgttattaatgatttagatatttgctactttactttagagatcaatgttactgatgtcgagttattgaacaaaatcacacagttagaaatgcctttcctgaaataacattgttttcatgagatgctggatgtaataagtaaaaatgaagagatgcaaagaaaaaaaatcttctgagacatcttctagtgagagctgaagcagtgtgctgctaacttgctgtgttttagaggctttaatttcattcttataattactttggctatgttaatcaatcatattctttggtgtaacccttaaaaacattatttattacatatctatatgtgagtgatattagtattcatgtgaatacatatggatatatttgaaggaattataattgattcacatgaaaaaaaagaaaaaacaaaggcagatctctgtgagttcgagaccagcctggtctacaagatctagttccagcctccaaagtcacagtgaaaccctgtctcgaaaaaccaaaaaaaaaaaaaaataataactgatgcatatgaacacctgtataagcaagtccatgatattaacatgtatctgcaggataggcactggctataagcactgaatatttagagcagcaaacgtcttcactgaatagactgcaaatcatgtatataaaagaatatacccattcctagtctgatcatttcaagaaagttaaatggaaattcccaaatacttagaagccagaaaacttattacttataaatatgaaatgctcttacagtattagctaaatgagcaatgatttaaaattaattaggttatctttaaagatgcaatttttgactgcattttaactggtaaagatatttgttgccagacccacgtagctgaatttgagtaccagaagccatacagtagaagggaaagttccttcaaacatgcttcctttaaccttgacacatgtgcgttcttataaacagatacatgaacatacattcacacgaacacatatacacacatgctcacacaaacacagaaagtataaattttattaaatattaatttttatttaacttgaaattatttgatttctatttgaattattaactgatattggagagttatttcatttgagtaacaccagagtttatatcatagtcacaaaaagtatgaaatcttccaaatttaattttaaaagctcatatttaaaatagtaaacccattgtaaatatatcttccacttttcatttttatttcttttttttaattttttctccttttttattagaaaggaaattattttacatttcaaacccaggtccctctccctcccattgtcccctgtccctgccacctcacaccctacctatcccatacccttattactttggtctttcaaatcatgtaatttaaaaagtttatgcttctcgtgctagagtttccttcattttatttctgacaaagtgtcagtcatcacatttcaacagggagacgtttgtttggatataattctcagtgttgtagaattgcagagacaatcacattcactgaagatatatctgctggctgcacagccatgcatcaatgtttccaatttacaagatttaaattaatggctgttttgtagaaaacaaaaaagtagttatcaaagaaacaaatccaatgtaaaaccactcactacccactagattcatgcaatcattggatatttggaaatcaaattagaaatagtacaatcaagatgtgattctttccttgtaaaatgcaaagcagagaaaatggaagtggtctgagtcatcagaaactttggaaaaacgtagagagcttaatgggcagtctttctccttcagtcttactcatcaagctggcagtaggggttatagttgctagggcattgacactaacttgaacatggtcattctgttattagcaatgtatatcctttctccgttttctcatctttaccttgggagatgaatgcaaatacttcacgaagttttccttctgcaattgtatgtcggttgtgttgcttcctatagttgcttacagatggaggaacagggtgttcgttcataccagttaggaaaggaaaacagattcaattcagccacatttcaatgggaaatacatgattcctacaaaaatcttatatttggacattgatcttcctcttttatttctgtgtttaggtcaggtgaatttgtgaatgcaattaaatcagttgccaacattaagtcatatgctcataataagtcaactgcacaagtaaactttactaagagaacttaatattataacacttgtgcagtgaagaaaatatgaattgttcatagtgaatctccagaatttggacagtggtttgcattctactctaaatttcttaaccaatgtgttcaatgtgatttactgatttccacttacaacgcactccctattacacatttgcaattctttacaggtgaaaggcactggttgcaacaacagcagaagctgcaacaaatgtttaaaattgccagccatcttgacaaaattcgtagatgtttaatataatttaatatagacaattttacccaaaccccatcaatgagcacattttttttctccattttttatttaaattagaaacaagattattttatgtgtcaatcctagttccctctcccctcctcctctgccccccattaacaccctacctatccaataccatttctgctcgtcagggagggtgaggaattccatgggtgatcttcagagtctgtcatttcctttgggctagggcctaggccctcccccatgtgtctaggctgagggaatatccctctctgtggaatgggctcccaaagtccattcctatgctagggataagtactgatccactacaagaggccccatagatttccaaggcctccccactgacacccacattcatggggtcaggatcagttccatagtacacatcctaatgagtcaatttgcatctacttcctgtttagtaatcctgctaatgatatttgtgtgaaattgccattatttttccatggaaaatcttcagtaagactttggaatgttctctgaagagaacattttgtttataaaggtatttttatatgtagatatgtatgcttgaaggcatgtgcctgcagagtctaaaagtggacgtcaggactggtttacaggcattcttgtgtaggagtggtaggtattcttaaccacagagccacctctttcagccccttcattaagaaatttattataatgtatggagtattaaaaggagagataaaataggaaaatgggagtgattctttatagcaatcatagtttttctttagagttggtaaatgtggttattattttgtttaaatgatttggtaccatgtcatgtgataagaacacaattcatcttctcccttaggtacccttgctctgccttgtgttatctggtggcacaaagcctgtctaggaaaactttcaaagccattgcagtaattttgtgtttgggatgactttcaaaattgtctgtaacctgacaccatggcttgatttattatcatattaatacaagtttgctcactgaccatgaagccttctggacaaaatgctaataaaagggaagaagttccaaatggatgtaagtaacccaccagaaattatattagtcttagagttatatatgttcatgaaccagctcattttgctttattttcagttcataggaactgctctgctgtttctcataaaaattaccttcattgcacagtttgaaaatatgttaaaccgattgaacaaaacttgccacaatgtgaaaatatacctcaggatttccaattccaggaggtcaaataatctgcacagcttttaagaatgtgaatatttgcaagaaaatatttgcaacagttgcaatttttcatatgaaaaaaacggctacctatgtatacacgttaagtgctgttagcaaatctgcatacatctacagctgctgtcattatgatgttttgaacctgaggtttgattgttagggtaaaatttcagatactttaaggctaacagtctttacgactcaaagcctagatacattgagtagcgtttcctgtattaattgttataaatcggtgtggctttttatttctggtctttgtagttatgtaaataatgtaaatttatttatctctattatgcccaatgctatctacatttattattgtaattgaatgccccattttacaagaatcactgagcaaccatatgtgtggtgttcactttttctgccacttcaaattataagatcaatatcatggtttacatttcttaatttcaataagtgtatgataaatttattttattaatagaagatacattagcagaaggtaatgttatacaaatctatgaaatagatacttccaataaataaatattagctgtttgatttggcataataccttttggttttgtatatactgaaatagtacaatatgtattttaattcttattttggttaattacttaaaaattgataatgactaccatgtttgagttataaaatttctctctgtgtgcatatgtctctctttcaatagaggaataaaaatattagatgagtgaataatgatgtttattatttaatacaaagaactatgggcattatgaataagttttaacactaattaactttcaattcaaccccatttagtgaaattatttctaagataaaagaggaacataatctatcatgtttaagatgatattaaagtggtaaattctagttctgttttttacaacatttaaggtttgagagcagataaattattgtgctttattgcatttgacatggtattagattatcattttcaatggttttccttggagtatatatccatcctacataacattaatatgttatattgaataagtagcaaaagatgttatgagcatggtaaactattttagtttgaaaactttgctagggagatttaaaaatttattctatttatcttatccactgagaaggtttgcaagcaataaatactgttttagaatatatttttattaaatacatattaaaattatacattgaacctttcccaaagaaagagccaaacacatgtaactcataatgtacaatatttctctgatattttttgatatagttaaatttcaatttgaacatgattggcttgatatatatttataatgtaaattttatatagttttttccattgaacctttgctatagtagtttttcattggggctaacacctaaagtctaatgagttttcctggtatttcattacaggtgtgaatgcagtagaaacatggctttagttctgtcatttaggttgttttactgtcagaattttttcctactgtaacacctttgccattttccccaacaccttgctccttgtaagtggcaacttgataaaatagtgtgaagtttcccaaatctcatgccagctctgttctattgagaaaatacttatgtgatagatcttacctgattgttgcagccttatgagactagaactaagcacagtgtaactgtctgccacccaacaagccaccttacaataaccttccacctaaaaagatggatcaaaactaaattttaaaatatctgttactttgatactttgtgaggctaaacattttttcatatcacatctgtgtgtatgtgtgcacatttgagtattgtaagtatgtacaatgtaggctgtagagctcagaggtaaatatatgtgtctttctcaatagcagtatgtgttatttcttgagatacaatgtctactctgattggtcagtgatctttaggaaccctgttctcttcagcttcccagcatttccattgtacctgtgatactctggcttatatgatcttgttcttatatgttctcatattcggcagcaagcagtttacaactgatatcttttcttgctccctacacatttctctgaaacttcttcataaacattttggagcatagaaaagcattctctttacattggtactacagatcacattaggagatctacttctcaacacaaagaccaaagaagcaaaatcaatgatcaacttcttcagggctttttgcatcccccactacctgtaaaacaacagtgagaagacaattctaattgtgtgacactggaagtgtgtaaccatagcttatgcctttgtttctgataccttaaaactttctattctctcttgatctccaagaaagtcgtcatcttttatttcacttttgctgttagtgtttttactgaggcaaaaagaatgtgacgaataaccgaatttagtgttttagctgttagtgtttttatttaggcaaaaataatgtgatgggtgcctggctttctaagtttctatagtgatagaaaaacaagagtgtttgagtgcttactctctccaatttgatggtgctttgtgttgttaacacagagcttttattcggagagcctggctgagagaacagttccttaaggaagaaagagaaatgcaaaatactaagaaagggcttaagagcaggctcccaggcataatgacaatcaatgaactcaaatggggtactttgggactcctcccaggttattagaaccagttcctctggcagaactctctctctctttctctttctccctctctctctctctctctctctctctctctctctctctctctctctctcctttttcttgttattctctttattgtttatgactattacattttcatgaactttagacattaagttgctggatcatattttgtcagaacagaggcaggaaaacaattttaataacattgcaatcatacttgattttaaaatattttaaacaaaactctcttagagtacagatttctaaaattaatttgtaaagaaacagggcacattttctcagttttctccctagttactattatttttgttggcagatatattaaatatgatgtttaatagcattcaaaaatacagaatatcaattttattaaaatttacatagtctaaagtatttaaaatatgttagcacagtttttaagaatccattttacttcagtttcgcaagtagaaaaagataaatcacagaatttactcagtttattgatatttttaggtcaaagacaagccccaacatacaaacacatacagaatactcactgagcctcaccctgggtcacactaatgtttctcatttagtggttcttaatgatgatgtattttgggcattatattatacagcgtgtgttgtatgaagaattcagtacaaaaattatgcaaagttgtttgtaaaactgatcaaaagacttggtggaaaagaaactttaaatttacattttatttatttacggagacattgggagtatcatgttggggagaacatacattgtcagcaaaagtggaaacacacaatgttatggttcctggcaggctgagttggtcttctggtgagctttatgttaagtggatacaagttggagttatcagagaagagggaacatcaactgagaaaatatctccactagagcagaatgtagataaacctattgagcaatttcttaattagtgattgatgggggagtatgtcgcccattgtgggtggcaccatctgttggctggtgatcttgggttttgtaagaaagcagatagatgccgggcagtgatggtgcatgacattaatcccagatggatctctgtgagtttgagaccagcctggtttatacgagctagttccaggacagcctccaaagccacagggaaacctgtctaaaaaaataataataaaaaaaaacaaagaaagaaagcaaccagattgagtaagccaagatgagcaaaagagtaagcagcacccctccatggatcttgcttgctcttttcgtccctgtttgaaatcctgtcctgacttcccacagttgcctagaagtgtaattgaaataaatactttcttcaacaacttgcttttggaggtggtgttccatcacagccatggtaagcataactaagaaaggtgttcctacaacattcctgtgtggttcttaaacagcacctcacaaatgggaattggtgtcctaagcagaaacccacaaacacaaatctattcagtcagaatgagatgatgagtacagagaaaaaggcagactggagaagagttttccacagaagcaattcctgcatctgctggaggagagcccattggaaggattgattgaacaggggaaggttttgccatcttctacctacctagacagaacactctccttttggctgtacctccatttatgttcacactgataaaagacaggaagaacaagctatttatttaatttggttattctagacagagtttctctgtgtagcattgtagaccaggatagcttcgaactcacagagattcccccctgcctctgccttctgagtgttgggattaaaggtgtgtgccaccaccacccaactgaaaatgcttgtttctattatcgagatttaactctcacagaattaaactggagaatggacacaaacattaggctcaaacatagaaaaagatgtttatattattaacataatctagaacaatatgagacactattttgtgtattttctgggcacagggaggaagctggataatactttgttgtgtacattgggaatatacacatccaatacactgacaattttgtctgtgtggagggaaatttggcagtgcaataaaacttttaaatgcacgttctcactgactgaggagctacactcccagatctaattaaacatacctaaaaatgcaagtatggttttatacttcaaatgtatcttatttcacatgtgcaatgaatttatcaataatttcaaaaaatggtttgtaagtcattatgtgctcaccatggaagtgtttatatgtacacatatgcaattcaactgttatgcagatacctaaatagagtaaaagtgtcgtatttggtacaatgcttgtataaaagtgagatgagatggtcagtgtcagaaaggaggaactaggcaatatattgagggtgagacttggctttcattatattctttgttcttgatgataatggcaaaatgcttttattcattttattttatatgcatatattgagagactataaaatattttacatatatacatatacatataatataggcaaataaacttcctgatgttattttctccatctactcacatgacagattttcattctataagattatgatccctctagggtccttatgaaattggatggacttgctaaactctcatgactgtaactgctttgtcatcttacttctgtttgctcatgctctctttttaaaaataatttatctattattatttttgttatcatgtctgtcagcgcaagtgaaagtcagaggatactgcagcatcatcagcatttccttgcaactttttgtaggctcaaggactgaatttagggcctgagaagagcacagcaagtgtcttcactgctaagcagtctcagcagactcattcccatcctaccaaatatgtattctatcagttaaccagcacttgttcattctaatttgttcctatgatttggacttcttaaagggcatctcacatataatgtaggtggcaaaatatttcctttctgtatcttgtttattttattttcataacaacctttatcttcattcatgatgttaaaaactccagctccatcttcgagcttaataacatgtatagaacttatacaactcaatagcacagtaattaaaattacacagattaaaaatcagtcaaaggccctgaattaacttttttctcaaaattgacatattaagggacaacagacatataaagacatgattagcagcatttatcaactggaaaaatgaatcaaaattatgaaatattggtactgggcatgtattaagatgccccatatatatttaataggcaatgcaagcttttgaaaaggtaagaaaaaagtaaagccccaatactctatcttaggaaatatcagtccatgtagccaggactgaaattattacagagggcaattaagacattgaaacaagattatcatatgaccaaaaatggtccttttctaagtaggtatctccccagatgaaaccactatcaagtaaaaccatctgcattataggatttttcccagtattagtcacattaaataagatacaggaccatgaagcaacagtcaacagatacttgaacatatatatatatgtatgtatgtatatatatatatatatatatatatgtatgtatgtatatatatatatatatatatatatatgtatgtatatatgtacatatatacataatatatatgtaatgatatatatgtatcattacatttcattagcttttatagcactttgtcaattttgtaaaattaaggtaaaaaaatggagaaaatactgtttattcattcaagtaccttcatctatacaagaccattgccatgttatattcaaacctccaatgcctgcaatgattatttcctgttagtcattagtaatctgccacattgccaattttctacagcattgacaccctcagaaatgaaacattagaagaaaaatttgatatggtttatttttatttctggaaagcaaatttatgaaatgttgcctttccttgcaccgtccttaatatgacaactgtggtggggctatgctttacagctgtgggtctgctttaccgacaagtgcacagcaatgaagtacagagtatagcaaccaccctgggagggcctatggggcataacaaccagttgaccaatcaacacaaggcacggcctggcctccaagcctggaggcacaccaatcctgatcctgttcatacccctagacactccccttatgctgccatataagatctctatcccgtggctctctatgccatggcttcgcggcgtcttccctagccatctgccatggtggatggatgaaaggcctgatctaatggtgttagcttgttaaacaactgcaataaaagactcattgctcttacatcgaaaaaaatttatatctgtattaaaagaaaaaaaagaggcatggatttatagaggttttaatttctccatgtacaaaactgaattctttggagtgtttgagatacaatgataaatctatagctaataaagccattctttcagattaaaaaaagtttgccttgctcaatcattattcagtagcaaggtattgccatttcaagatgataattaattttagaaatgcaccaggatttttcttaagttttaaaatatctgttgtgtcttgttatgtggaagcaggaagtcatgtagagtccctgcagtcgacagaatgaaaagaactatagaacacaggccacacccttcctctacctaaatactgtcagaaatggtatgcttgtgttgaacatatggtttttgtatgcttgaccaagcaaaaataaatgacatacttgtatctttaaatgtttatctcataatgtaaatccatttaaaaattcaactttgttttgatggacatataaactaaaagggaatttttaatagctcacaatagaaattgatatttaatcctcactgaaagaaataaaattgccttctctaattttctttcctgtctgaatttcttgctttctttacttttatctttgtttctttttttccaacatgcacatgccctatagaactttatgacagttgtttgaaagagacttttcttagttattgccaccattcctttttgttttatattctatactagattagttagtaaatatttgatggacagcctgattgcttgtgtagatatgatgtgctacttaaagtgtcataagaattaccaaataaataataaaatatatttgcttcaaaattcttagtcccaaagtcatccagacaaagccaaccccaaacaaaatcagcatggcaatataaaaatataaaaatgtgtttgtactcaaattaagattctatttttgctctaatatttagcgactgcttcaccatataaaaggtcagtttaaattcttattagcaaatctgttttgtacatggtatgtacttatacaaatagacatgcaataacaactaatcaaagaaaaggccataagtttgaaggagacttgggagtgatatttgggtgcacttggaggaataaaataaggaaaggaagaaatgttttaattatacttcatccttaaaaataataaaaatgagacatttgtaagattactttattataggaaaacctataataaaatgaaagaaggaaataattgaggacatgaatgtagtctgcatcattttgctatccatctgccttttacttcaaaattagaatctgcgatataactaatactgtaaaagaacataaagactttatttttccacagtaaaaagaacaaaatattcaaaacaaagaacatccaaaaagagatgattacagtcaatatgtgcaaataaaataatacaatgaaaaacaaagacatgaagatactaatggccattgttggtgatacacaggaacctggtaagggggctcatctttagaaaataaaaatgctaatatccatgcatattttggtagaatttaaatcctaagctacagccttgaccttgtatgtatctttgcttcgagataaaaataagtcatttccaatctacacaaccctcttagttcattttttctaagctttatggtgaattgagtcatttctgaagagttttctttagtcttatttccttcttactatggttagcaggttaggataatcctccttccagaaaatgaagaaagtttttgtgtcactaagagaaaaacagtgggaaatcattgtagcaatttcacacaggaacccaacaaaaccagaaattctctgtgagcacaccaactgcacagctgtgggtttttcttgtatatgtcagggtgagttcatgttactgttacacttagttgtgtctttcagttcacttcttcctcaagacctccaaatccagaaggataacaatgacactagagctaaacctgaattcttcaaattcaatgaatgtcattttcctgagggattcataaaaaaggggaaaaaggagaagtgtactgcccaattcatataagggacaataacattttataaaatgtcaaatcttgttgagaaagatgttatccacttaatttagaacaaaatcttgccccctcctcatttcctctttaaagctcccaattacttccctgaaaggaagcccatgttttaataaggtttattccactgtgacccttctgtgtgtttcctcaatagacagcaaatctctgactataattgcaagatgttcaagtctcaatacttttttttgcctgaagaaacagttcaaaccacctcacaatggacacttctatttctgcaagatccccagtatagactatagtttcagagtgaccccagttagtgtagtttcttttttttccctccactccccatcctctccctgaagagcatccctcctcctctcccttctacccccttctgtatttctttttattctgagacagcttgtaaggaatcgcagactgccacagaacattttatataaccaagaatcaatcttgattccacataagactgcctacagccctcaagttatgggatcaaaggaaagcaccaccataccatggatatttggtattgactattctcaatacacagcctcatgtgctaggcaatcattctgccaactgagatatatattaatcctactagtatacattcttcattttgttattaagctgtttatttttctcaatgttttcccttttctgtttaagaccccaataaaatcctatcttttcagtctccaaaagcaattagtgctacacatactactgagtttaaaagaaattcctgtccagataaattatctgaataaatgagctttaaagattttgccctttccttccataatgatcatacattcacctcccaagaaaaagagaccactttcatagtatcagagcttaaaactttgtgatagaatggaaattaagataattataaaattcactataaatatactacagtgatatgttatgaataaactcactatgttagtaatcttaaagttcttatttttatcatttaaaattaattttttatatattatcagaatcaaatggccactgttatcatttgacagtaatgacaataatatttcagtgacttatcttaaattacacagttcattcactcttgtttagacaaaactctacaatttaaattcaaaatcttccatgccattgcatcatttacattggttaagtggatcttagaacaccttaggataaaccattttagcaattccagagccaggacccacatggatagaccaatatgagaggattctgtgaagaagaacagtagcggtacccatagggcaatgctgtatacagtcgtcatgtggactcactcccattttgttctttatttacctgttgccctttcctcacagcagcacatgaaagtaatcacttcagaagctactttagacctttgcttaactctcactcattgcattgcttagtgtcaatacctttaaaatgattttagcaaaatctatatggcaaaatttcttattatcaaacttcaatgtttggacttaaatctcaagtaggcgccattttactaagatgactgaaagagtgaaaacacattttaggaaagtaagtctccaaataaattaattcagagatgccaaggactgttcagtcattgaatctggaggatgttttgtactttctacaggaactacttataaattttaaatatctgcttagaggtgaaaaaccagtcttagggcagataaatcatttcaaaaacacccctttactttgtatataatacacttaggttgtgaccctccagatatttaatatttaaaggaaagagattctaaaaatttaaattaattcttattcacaccttcatacacaaatttgtaacaatttaaatattaaatattcagtacaagtcatcattaaaataacattatatgagaaaggacagcaattatcaacactgccatcttatttgtgctgaagatttttagcatgtacattcatcctaaaataatttcttttattcagctgaccatagaagaactttgttttagataatgactaacttaaatatattatagattcatttttacctttttagtattgcaacagttaaatccacagtttataagtaacttgacagttgaattttaaagctcataaaaaagaatattttcagaggcatgtttactgactttctatcaaatgttccaatgataatattatttcaaagagttcacagttaaaaatttaactaaaaattgaaaatgcgctgaaaatttcttactgtgattacccagtaatttttgtgtcattaagttacatgtggagcatttattattttaaattcttctcaattttcttagataaaattttgagaatttcttttatatgagatcaccgtagatgcctcctaagttcactgacaaaagctgtcacatagctggtacagtcttcactcctcctctagccagtggtccccagagttaatttaaaatatactcacatgctaacccttcaaatcaaaaaggctaatatttctcaggtaatcaatgaatacaagggatttcattcaccacatgctaatctaccttgatgctacaacatgctttggaatttaaaataaaacatagagctagatcttaattacatctgtttttaatccctttaaagttaacacttcacttttttgtatcaccattaattaatctttatgatggacacaggaaaagaggagttatacgtggacctttccaagacttaatgacattattctgtcatgtctgttttgctattctctcacagttcgcttttcatcagtaattcaaaatatttgtcagcatttagggaaataacagttttagcatcaactcttataatacagccaccatccaaatgttgccattagagcagcaccatagatgaaagcctgagtagtttaaaacgttctgtcttagggtgtgaagatgaaagcctcagatcctccgaaatacttcttgttgaaaacattaaaataaaataaaaatcactaacaaattattccatattttttaggatcataggaaatgttgtaagcctaatttggtaaagaatttgaagatttatatttcaaaataattaaataattccaaaggcaaatctgtctgatttaaacacaaaatgttttataagttttcggagattgctcaggacaccttaatcagttcagtggcccaatgaaccatgaaagacttaatgaagatgaaatggtatctaaacaaaaatgattttccagcaatatatgaattaattttaaaattcctatcatcaagtactgtgtattctcattaatattaatttaaaccaccaggaagtttgtgcataattcttcaatgtcaaagtccaaggtacaatagtatcccagaaaatattacaccattgaaagggaattcttgtttaaaactgcatgggagctcccaggtgagctcaaacagatcccatgcactctcctactattatgtttacattaggtttaatttaaagaagaagcctctttaaactaaagaatacttgcaaatgtaaagttcagtatctgcaaagctatagatgaaatttgataaattggaaagtaaatttctcatgaaattgcccatttatcacttagtccctgtcaacatgtgtggcaacatgaacaaaatgggtagtgattagagacattatgggagatgaggaggtatttctagatcttgtaaggaagtgtatctatggttcaactcttactgagtatttttactaatatgaatatcacagtaataatgttttgatccagctttaccaccagtgtgaattagcagtatttctcttctgaaaccctttatgctgcagttactatgggatgggagtggaggataacacctccttctaaggaattaacatctacaaggatattaagaccagtggatacctattcccctatcatgtttgtatatgtaataagatttttatatctaatgcctaagaaacaacttatggcacagataattgaatcactttccacctcatcctggccccaaacccagctacctatacctcagataaacttcaccgttctcatcataatggagacagaagcaggtttcacacatgcacagagagcagtaatctgtgtgagtataaacacacacacagactctctctctctctctctctctctctctctctctctctctctctctctctctcacacacacacacacacacacacacatacacacacactgtgtgtgttgctcttctaaaaatacccaaactctgtggtctgtatatcctgagctgtggactatttggaaccacaactgacatccatggaacacacgttattctcaatttctcaagaaaagtctagtgacaaactttaataaatggtaacccaagctgctgggttctttaggccactatgaattttgaaggaattactgattataaagccatagggaaaatcagtttcataagtcagtactcagtgttaccttagtgaacttttatttggaactgtttaaaatgtggcagttatcgaagcaatctcagattaagaaacatacaagagaagaccaagagtgcgatgtataaagatggcagtggatgacacagtgccgccatgtggacttggaagagttcactgcctgcagtggaggagaaaagtcctgctctttggccaactgcttgccttgcaggaggggcttaactggcagacagaagctatacaatgcagccaagtatatgctcaacactccaattttatgtcatggaatcaatagtggtaaaaaaaatgacctgcatttaagttaggaaaaaagaaaacagtgtgtaaaacaatgtaagttttataaatagtttttggaaaagcaagttcaatgattttaactcaggaaaaataatcttgattagataatttaattattagccatgggtttttaaaggtgagtctatctatatagagccatttaaaattatcctaatagctattgcattgaaacagtataatttgttttattgacttttaatagaagtcatttatttaaaaaattaagtttcaaactaattgaaaaaaataatatatcctatttatcataacctactaatcacatacataaggatattcaattttcttaaagagcaggggaattagaaaaattcacaatccagatttaagagttaaggagttttataaacttcattacttttgaagtgaatcggcctctaatgtggagttatggatcacaagggctcaggaaacagacttgcagggatgtgacaagtctaggcttccggccagcttctatgctgctccatagtgatgaaaagttcagggaacatcttcagatagccttaacactagtctagaaaagtatcatctcagaacacaaactggcttgctgtaggcaggcatatgcataagcttttgctgtctaagcacataaacacatacatgtcttttaagagaaatcaacggtcagtcttctggtagcagcaatgaaatgtattcacaggtaattaaaaacaacaaacactcaagtatgtgtgatggtgtggatgaagtaaattgtaatcttttaaatatttcagcattgttaaaattttagaatataattttgatgacatggctttataaactaaatgtctcataaaatgagtttagcatttctgacatctatatatcaaagtcatcttcacagtatcatacatggacaaattgttgtgcttttattttaatcattacaaaaatgtatcttgtttttatctacaagtaaagaaaagtctgtaatgcctttgccagcagagcatctacttgatgtctgcatctgacaagcactctgcccttcactgacaccctctggtcctgattgctaagtcagcatggccagcaaaccacaactcttacctgctaccttcaaggtagcacaggtttcacaaatgtcaaataaaatgacacttagggatatggatttcaggaagtgagttatatctttcattcttttattgaactaaagtgtgagcttaaatatactttcatgcacaacagatttatcatctttaatgaatatacatgatctaattgtaaaagtaaagtttttctctcttactacccagtaataaatcagtttcaggccccctaatggccaaaataattttacaaatactgagagatgttcaggtatattagccatccgtttaaaatttccacaactctttccagatatttcaccaaaagatttctaatgacactgaaactcctgcctcacagctaaagtctagcatttagtttatcatcataataattttcatttttttaacttgcaagtattctaactttccatttaattgcctatggaaccagagagaagtctaaaaactggtttttcttctgttagagttcagaagatttaggtaacattacggggtataccaaccttgacctccaaatattaagctgtccactaaatactccactggtgatacagcctctttcactaccatgtggcactccagctgagattgctcaaaaagtctttcttctatattacaaatattattttaaattttgactgtgaaatgtttctttctacaattaattagattcaattgacattttacattatctatccactattttaatcctttttaaaatgtattcttatgtagtcacttagtgtgtttatcatctgatcagcataagcatacctgtcaaacttaagacttggggcttgtgcctgtgaagaccttaaaatactttcaacattaaatgagaaattatgcagctcatcactggccactgacactttataagcatgtcttcatgtcttagcctcagtttagtcttggtattaatcaggatgcagtccttgtagcccattgtgacatttagaggtaattctgtaggtctgctgcagctcaatagcaaccaattatatttccaacattttgttagttcaatgcattgtttcatttttatgatactgctatttgaaggtttgctactgtcttcattcttctttgtcattcctaagactcaaaaacagagcagacagctgagttccctaagtgacttctttccaaaacaagtatgtgaagtagtggataaagccttacacagaaaaccctgtgaaagttctccaaacctgccctaagataagcatactcattttcatacacatgctaggtttacataaaactattctcaaatattagtgcattcttattctttttggaacaaaaaaaattaatcaacctaaaaatttttgggttgtcatagaaatcctcagctcattgaatattcacagtcatagatattcaaactagtattctctccctgttttcctgtaaaaataagaatttgggaaatcatattcagcaaatgcatctatgcacagcatgcagggaaaaataactcagcataattcaaggcactgctttttcagttccctaaactttgcagaactctacttggatcttttctgaattttaacaagttatggcaccgttagattaggtctctattcttagattgttcagtttatgagattctcagccatgacctgagaaccccgtcctattttttttccatcctaaacaatgcattgctttagtaaaaatcgttcttatccatcgtggcattcaccatgcctaaattttcttgcttctgtttttgttttcctcttttttttcgggtggccttatgagataaacaacatatacttgcttcaacttttcaatgtaaaatcccagcagagaaaaatactgttttctcatcgtaaaacaagaatcattgggcaatttttacctctggcaacacggcaaggaaggatggctttggagaagcgactgtgtcaaaaaccctaagtggctgggaaccgaagtgcaccatcacagggagcagtcaccagcgaaggaatgccagccacttaccaatgagatcccagctgcctctgtccatttcggggactctcaatcccggtctcccatcctcctgctctgggcgcagctcagatggagcagttccttgggtgctcctcagcctgtggcagaagagaaatcgcagagttctgagtccttcactgggaattctcctcaggcttgccctgcctctcccagcagaggggacccaggtgaggcatcctcttggctgcgagctttaatggcacttggctgccagcacttgcacggggcggaggagttgggagatacaggcaggtgcaggtgggcgcctcctcccgctgctgctcagggctcgcgctgatgctccaatgcgtccacgcgccccgcgccgcgcgccctgactggctgggtccttccacnnnnnnnnnnnnnnnnnnnnnnnnnnnnnnnnnnnnnnnnnnnnnnnnnnncgcccctcccgctccgcgctgtcaccgtcgccaggcgcctagctgcctcgcgctgcaaaggctcatttagcatgtccctgcctgtaaaagactgtatgcctcaagcagggctttggatttctttctttttcacatggtactccacttgcatcactgaccaaccggtacccccgctccctctcctctccaaagtagggaaggctgtttacccgtacctgtccacctctgggtgcttcacattcaccagtgacagtgaatgtgctggctgaaggatgcaccgggactggcagactctgggtcccgtcttccctttgcccgctgctgtccctgctgattgccaggctgtagtgatagctcagacagaggaggctcagacccaggcgcgcacttatgctgtctccagaggagaactggcactcgggagagtgtggttaggttctaactggaaggcaattctcttttgtgtgtacatgtgagttccacctaagggcgatgcacttggggctgtattacttgtccttgataatggtggggtagtggtggtttagagtcacttctggaagagccaaggaaacagtaggtttggcttcttgttttgtattttgttttttgtttgtttgtttgttttttgtctgcaattttctatcacaatgtccatagttgaaaaaatagctcaggtagtaaatccgaggtggcagctttagtgttatttatctgttgatttctggactttccctgtcttttgagtgcttcagcttcatgtgtctggtggtaatcgagtatttatgaaataaattccgtttcatgcattttgcctccaactccatgtggcttgcacctgtatgtgacaaggctggaaaccacacacactctcttctctgccagcctgtctaccctgggaactctgtgtgagccatgggctgcatctgtaccaagaggtacacagtgttcacatgtgtgtgactcctcctgatgatccctgtgttcaggggaatggatgttctgcggaagactttggcccccagtgggctgtgaaaggctgtaattggcaaggcatgtgcagagccagtagctggaagccagataccactggagctctctgctcccctccttacagcttttctggtaattaaaattagtcgttttcctggtccttggctaatctcatatgctgtgcaaacactgaggcttctttgaagggctaccctcaggatctaggttggcttctttgtcacagcaaagacaattttgtgtgtttgtatttaatgcttctctaccctttcgtactttttattttcttgttcctgctttccagtaattaggctattttccttatgtgttaactgagccattgttggagagagtcaagctttctgggcggtttctctgctatgctggccccatgcctacagcaggctgtttaggggtttgaatcaacacagttttacaagctctttaaatatactgtaaggcagagtccgaatctatgagcttcaaagctgttttaaaaattatacaaattgcacaacaaaactttgcttttcaatgcttattataattgaacacacacagctttcatgtgtcagagattgagcctggccccctccccccacagcctgcttcctggagtacacctatggatgatttgttatctttttaaatcattccaccctttatttcatgtattttctttcaactaaccttgatccagaaggatgaaaattgacttctagaaatgtattcactgcagtaaataatgaatgtagctcaataaatcaaggcatgaggtcaagaagtacaagtaaaaatgagaagatttgctgaagccaggaaagagggagatgaggaagtttaatctgtcttgtctcacaaaacatgcctggtttatcattgacattaccagaccccaacgagagaaggatggttggccatcatgtgactcaagttatgagtgagaaaatctgctgtgagccaggctgggtggtgcacctgtaatcccaacactcaaggagcctgaagcccaaggatcatgaatttgggtccaacctgtacaacatagccaggtaattcacaaatccaacaatcaaacaaaaagaatgatatagaaagattaaatctttgcacccttttaacaaaaaagtgagacaaactatcaagtattttaaatgtgacaatgttatatgtgatagtatttttcccttttgaagttgtctgatcatttaaaaatgaaaaatatgtgggagtctgattaattagggatagtaagatctctttctgtctgttcaaactgagactggcagagtctagtaattacttgtgactgacaaagttactcagctacatttcttcagaaccaaagcgtttgtatagactggttattttgtttcttttattacttatagtgtttaaaaatatatattagatatgaataaacatatatttattcatgtatattgcatacatattaatctgtatgacttcatcctcttgtagtgaagcttagaatgtggatatcacggagcttatttttcttggaaagtgaaagttttatacactatatgtactttcttatattctgtcatagcgacagggctggagtataagcaaagataatactggtgcttaaaataagaaaatgtcagcatgcatgaagaaagacaaattaacttatgctttgtgagcacttttcaaatgtgctcacaaatactatcaccgtgatttttttattactgtcatgtggaagtggcatttttaaaaaaaatatagttttgacttaagatatctttttaaaagatatgaaatcatgcacgttttataaaactccagggcttcagagttaataaaatattattaaaacatcaagtctgtctattttatagggtcaatgacattttggatggggcagccccttctctaccttgataaaatattgagcattgaatgaattaaaatcattgtttgggaagggtctttagtatttcactagacaagcttttgaaagccaccttaacagtgcatccatctagctgtcacatagcttttctgatctcattgtctagctgccttttgtgtaaatgtcttaatctttttgtgtcctagtctccagtgggtaagcaacagatgaagtgcataagtagccatgctgttatgtctgagctcttgtcttgtttgtgctatggactgttttctttaaatcacacttccctttctttttctctgcatggcacttactcatgtgaggttctgtgttccagttaattgatcatcatcattttatatactaccaaatagcacttcaaattggcagtaagcagatccatatttgtttagatatgtaggacactggcccaccaactttgcctattgtggctatgttttctatttgcactgtttatgtctacgtggtttttctaatcttctaagtaacattgttagtcaaagtgggacagaaaatacacttaaataaaaacacagttaaggaaatgaggaagttgcattgtctgtttacagcagcatgctcagtaggtgtgaattaaataccaggaaatcaattcaacttttatttgaaatgagaacactttgaggcttttcatttctgtataggtttataaaatcatctgtcctcttactcctatcagagctgattttagaaaacagaatagacaaatcctaataagactttgagaatctgtcaaattaattagcagctgctatagcaatagcagcaaagagggttggctgtgttgtgaatgtccagagatacctttcacaactacaaatagtaagaggtgtggtggttcagcattcagaccagggctctggtagcagagtctcagtattcttgggtcagttttcaatctcaaggtgcctattgatgcattgatgtttgacttttggtggaagcatagttttactctgtatctctgcctggacttgaaattgctatgtagcccagactggcttagattcttatagttctctcaccacagcctcacaaatgctgatattgcaggtgtcctgcattacaggtgaccccaaagtgtacatttaaaggtggctatgttttgctttgtatagaattttttcagtatatcttcacttacaacattttatcaatatcgaaagaaaatatttaggaaccataagaccatgagaaaatagcttccagatagttagtttacaaaccagctttctcaactttgagtaaatatctccaaatgtttcctgttgatcaagttttatgcttggtcctgaagggctgtcacgggggtgtgggtaaatggtctttcccctcacccatggaacggcaagaaagcattctctgactaccttactccatcttttgacttttctcttgcatgaaaataatctgttcagagaaatctattcagtgtcatgcctcttttactcagtagcccttggacgtctcatctgcatccaggctcttgctcttcctgcttcatgacagagattctctttatagaagttatgactttttgtagaattaaagggtgtttgcaaggaaattcaatataaaaagctttttacttttatttgcttcctgacacccttccttcgtccgtctgtccgtccgtccgtctgtctgtctgtctgtctattatttatttatctttcttttttttactggtagaggttcttactgagtagccctggttggcttggaacttgcagtgtaggctgtacttcatccaccagtcttcttgctctctccagtaagcttgtagtagctattgtaaccactagatggcactcgtgttttaattagccatgccatttgcgtttttgccctggggatgttctgatttgattggattcattttaggctactgaatggaaccccaaattaggaaacgatgctacaagaactatatacatgatattacctgcaacattaacaaagcgcactggtgtcaggcgaaatgccagacttctgtagccgctctcgctgctctttcacttcctgaggaatcccacaggagccttgtgagagccaccacgcgccagctattattgcagagaaacacatccgagctgatccccagtgatctagcatgggcacaaacccaagcagatttgagtgttttgacgtggtcaccaaagaaccagccttcctaccactaatataaaacagtgagatcacagagacagaagctgtgtcagaggcaggaagcagatctcagctacacaagtgccaagcaatcccaaaggcacaagaagacttgatggctgaaaagctggtgaggtggcaatctctgtcacttccgtaagtctgctcgagtggcacttctgaagaacccactgctctgtgcctttacaaaaattagctgactttgatgtctagttgtacttaattaatgttggcacaggatctctctttttagccctttctcccttatctccctaatgaatctccggcaacctcatatgaggaaccagtaatgacataggtgttagacctccactggtaacagttttgttcatgatggagcagctccattggctttgcttgctgactggtaaaaacttgctatatgtctatgaaatctgcagatataatttattaacaagagagtacagacacaacacaaatattttgtgcttaagtaacaccttcctcctaaggatctcgagcctacttcatgtggcaacaaaaattaagcaatagcttacagctctctgacacctcttttatacacatctcattatttccccttacgccaactttccagggaagggagaatcacaggcagtaagggctttcatgcagctggtgacaggggttactggtgcaatgaaaataaattacttgtggtgccaaagtacaagagagtgcaattttgttatcaactcttaattgattattaattatcatataggttcacaaagggctagcagtctcctcgtggcaaagaggaggaggctatgttggatagtctcaaggaaagccaaaggctgagcaaggaggcagcctattacctggggtactggcattaaatgatgcttgctaatgaggatgtagagagtgaacccagcagcagagaagagatcaaaccagaaacacattgaaaaacaatctcagatgggtgaaataaaaaaaaaaaaacaatgatccctgcaaagaagctgttgccaattgtctaaaatcccagttaatttactaccacccacagtgagaagcctccaagtgtgggtactttagatgctttacagtggggatcagggcagttgaggagagactcttattgcattaatgaatactgtttgctttgtcagagcttggaagcaaaggccacaagacattaaaccatagctttgtattactaggataagtgggaaaataataaaaaatcaaaataatccaatttccaaattaaggagagaatcaataaaaaggatgtagtctgtatagtcaatctccagtccaggaaccaccatttttatctgggtctggtatgccttctatgaatcgtttttgtctgctctccttggcaaagtacatgctacacagtccatgacaaccttctatggtgagcaggctaaaattccctctcatatctccagcccaacacagagccataaacttttctccacggcttactttttcattagcttgcttctcatgtgaactgaattaaaattttacccacacaacttcttaagagattgactggcataaatactatttttatcacctgttgatttaaattgtgttagcccaactaatgagtttgtcattgatctggtattgaggaaacaaaagcatgggggggcatgtttaatatgcaagaaagtgcatgtggtctgataagagaagatatagattctggtccctctgcaggctattcataatgaactcagttcttgatgattgagtatagggagttcattgtcatttcaagacaccccaagaccaagttctcagcacaaaggagatttatttgctccagggaaaagtgaagtgaataagagacaaggaaaggagatagaggatgagggagaacaagaaggaaggaaataatgaagagggtacagatgtatgtgtccctaggttgtgggggggcgggcaaaggacttcctcaggatacacaggagacagacatgacccacaggcaaatggaagtttataaaggtaaaaggggagactccatgctaggatgaggtatttagttttgattgggcatgttaactaggacagccaagggagcttttgattgctggtctttaatattttgatagctggaccatagtagtcagcctcaggagaagggtttggataaataagggaatagactgggtggttaactttaggaatgtaatctaatagttttggcaaggcagaggggatgggggacaagggcaaggccttccaagagtcatgtttgccatgcttggtctgcatagagtcccttcattgaggacaaagcaaataacactatgacatttctcttccactagtgtctaaatgacagtttgcattttgttgtgtgtatttaagatacacaatgcagtgtgtgtcatatgtgtatacctttatttcaataaaaattaaccaaccacatcaacttaatatgttccacagtttcaaagtacatgtgtgtgtacagggtgtgcagggtgcggagtggtaaatatacatgaaactttataacaaatttccgctgtgcaataaaatatcaacaagtacacttttcacagtgtgcactgggtgctcatttgtttacttttcctagttggtgtgagacttcctgagacccttatctgttcccaccacatcagcctccagtctgcacctggcaaaccgtggtgcatcctggctataactcacacacatgacatcatgctggatatttgctcctgtgtgacttatttcatttagtagtattcttttccttctatcataaatgcaatgtaagacttgctagaccaagaaaaatgaaatttcccaaactatcatttacattgggagattttattaacataaaatgttctctaaaattagcaaactacaaaattgggatgtagaggggctgattgctgagttgtatgtgatggaatgtctgttgcttcagtgtgctgtctggggactttgcaacaatattactcatagctctaacattcaattttaaaattcttattattaggtattaatataatcatatattgacattgtttaataccttttttgaaaatattttagatttacttattttatttaatgtgaaaaaatgttttgctttagcatatacgtgtgtgtgtgtgtgtgtgtgtgtgtgtgtgtgtatccacagaggtcagaaggcagtatcatattctttcgaactaaagttaaagatgattgtgagtcaccatgtgggtggtaaaaactgaagccagattctctgcaagagcaataaatgctcttaatagccaagccatatctctagtccctagtttctgcctcttttcaagaaacattttgttattaaatttttgatgcaccattttcatttactctttttaaaaaacttttattgattctttgtggatttcacatcatgtattccgatcctattcatctccctgtccctatcatcctctgcccttgcaaccttgccccacaaaataaaataaaatttgaaaaaaaaccagtaaaacccaaacaaaacaaaaacaaggcaaaaaatgtcagtgtgcaggctgtagtgtcacactgtataagatttagtccacagatctttatttgtaagtgttcattgacatgagacattggtctggttcaaggactcaggtttctgctacacccttggcactgggccctcactgggactcctcttggaaatccttttgttgctttgtatggaggatctttcagctttggatctgcagttccagccccttcccatgctccagaagttcatagatgaggtgaatgttggcctgggctgccccatagtcctgattctgggcctgggtggtagctctgttggtcagctggccagctttctctcatacttactaccagggcaagctttcaagcgtggccctggttaactcaagtaacttacagtccaggaagtagagcgatgtcagaaatgtgcttacagagacatttacaaggtcctctggggaaacataaggaactttgattccccaaaagaaagtgaagtcttccacaggcagagaattaatacaactgatatttgaatgtaactgagatgtatagatatatatttatatcaatgcctgaaaaccttcccccacctgctagaagcatagtgggtgttttaaattcacaattcaggaaatttaacattactaaatatggttagatgctgaaggccctgaaaagtgtagagcaggatattacaatgaagaaagtaaaatttaaaatacattagtggttatcagaggctgaatgggttggggagtggtatatgccagattagataattggagtcactgcaactataaccaggaggtgatgcatcaatgggttaatagctctgagagagaaagatcagttgcagtgctaaaattactcagaaatatgcaataaactaaaaatgcactgttaaaatgtatggcaaaggcctttagaatgagggcacaagagatctggggtagcaagagactatgagaaagtggaaaagaagcttgctatactgtgtttctttccattcttgacaacagaaattacagcatagcaaatgagagacaagaaatggtctcagtctaccaaatcctgatatttgttagtgcatttagccaagcaaaatgctgttcttcttccactgtgagggtagaactgttgcccttcccgtacttcgagggaagaaccactgcctttcctccactgtgagggtagagccactacctttcccctactgtgagagtagaacctgtacccttcccacactgggagggcagacccactgcccttgtgcttctgggatgcccttcccctactggaagggcagaactgctgccttcctctactgggatgggtaaaacatggggagaaccctacttgttgaatcccatgggtttaattgaggcagcgactgtactttgaacagttttgtaagtagttcagctttaaacactgtgacactgtttaaactgtgaaccccttgaggaaaccacactgaataatcttgaatatccctgatacaagtgctgagatgttttgacggtaaccaaatagagttggtgtaaggaatatgtcagttcttctcttcagaaaaatgctgtgggaagaagtcagagctgtagatgagggctttgagaagcaagactccattatcaatatagggaaatgagaactgagaacactggagacaaatggtaatatctccaaggtagagatagaggcacttggcagaatgccaaggaaatcagagcataagggacttttccaaaggcaggcagctgtagatatgacaaaaaaagaagaaagaaagaggagagagagagagagagagagagagagagagagagagagagagagagagagaaggctaagtgaaaatggagtttggacaaagtagaaaagacagctttgaaaaatgttaccaaagcaatgaaagttattcaagagaaatcaccaaaaggttgaggtattgtagtaatgaaaatcaactcttaaagaaatttgcagaaaagttctgaagcacgatcctaattagtcttgtggtcagcagatgatgcttgatactaactactcttaataattaaaaactcagagtcagatatcagggtaaatgctgaaagatcagagaagtaaagtaccagccagacacagtcacatcttacctctcctactcttcagaccaaaaagaggcaagctactgcctatacccagccttaccacttgctctctctgtgcagccatttcacttcctgtttcctgtctgtgcagatctccagacagacctcgataagtaaccagtggctagttccaccctctgatgttcatgtaagctttatttgtcagaacacaaacaaaatatcacaacaaagttgaaatttgatcttcttcatttggtcaatcctaatctgggttgcataggactaacttttgggggactgtggtggtttttgctttctttcctgaaggactatttttcaaatcaatcatcttattctcccctgtattagttgttagtttgagaatagctcttggaaattacagctagttcttaatccctatataaaataaatatgtatagagtagaagcctctattttcatatataatgtatgaaaataattattcacaaaattcacaaaaatttaaagaatgattaatcctacttttgctttgttgttttgttttgttgtttggcttggtttgagacacagtctcctcatctagcccacactggcatctcacttatgatcctcctgcaccagattttaaagcacatcatcttctctggttaagagtgttttattcttaaaacaaaaccaatttgtctcacagaaagaggacttactcagtgttgtatgaagttatagaaacttactttccagtttctaactgaaaggatctggagagcttgaacatttcaaataaaaatgaaatatacatttttaagtttttaaatttatcccaattagacttaattctttgacatgctacctgcttaaatttactaatgccttcatttcattcgtaaaatcataaataattttatgtaaaatagtgtgacatggttgtctataagctattataaattttatggtctttatcactaattactatgcctataataatgaaatttaaaagtttaaattattgttgatataaacaggacaatctatgtaatatctcataggaaattaaagtaagaattatctcctcatactttatttagaaaaagtttcctaaattctgaggtaataaaatataagaaaaatatatcaaatggttattctgggacttgtaaaaaatcaaattaacatgatttgaataatttcagcaaatcaaacaatgtatgtttgaaggagacagattatactggctcaaaccatgaatgatgctctttattaggctctatttaaatagaaagttaagaaataattcttaaatattatactataaacttgttttcgcaattgaaatttcttttgaattggccatccattcatctggatctatttatatattatataaatacacacacacacatacataatacatacatacatacatatttcttggagtttttgaaaatgaaatgttgaactggtctcctaaaatattttatgtatatgtggaacagtgatcagaatacatatttttgttttggcctgtgcttgtagacatgaattttaattagctcaacagcagctgatgataagattgtttgcatgtacaagagtgtggctgatagaagcagccctaaaggcaattaagtagaattaagcatgtttttttttaactgagaaacagaatcctcagtgtgaactatttattccaatccaatcatggcagacatcagtcatcactcatagcaagataaaacagaaagttctaaatagacatacccatttgatttcaggttggcagagtagactatcagtgtttctggtaacttgtgtacaaatactaggaccacttcatagttcaagatagagtctgactgagttgcttaggtaagactagaatgtacatgcaatacagacaaatcttgaattttggatcctctttgcttggcttctaagcagctaagaatatgcttttactagactaggatatgattatctttttaatggaaaatttaatccacttacattcaagatgacaattactcctgggaagctgttaatactgtcatcatgtagtatactttctggatttttatgtttctttttccatatctaaattatgtttaagtgatttattctagtactatgttttgatgttttggttattatatttttatctattataggttttgatcagtgattgtctcaaaggttggaaatcacctcttgattatagcaagctatcaaaaatgaaaacaacttaactacaagcataaaatcactagaacaagagactatactactaataatctaaatttgcatctaattttcactgatagtttgaatcataaagacacattttacatatttttaaatttcgtaccaattaatatattgaggaagcatcattttggaaaaatattttgattttcagtatttgctgaaaagatagaagttgtctacatgctatactttcaatagacatgaattaaactgaatctgtcagtttaattattattaaaacagaaacataagaaggtataaaattatattccaaagataattaaactaaaagattcagtatgtctacagaacattacttagcatctctccttgaacatgaatggcagaggtacaccagacattgtatttacttatgacttatctctccttcacttctcaaagatagtctttaatcttagtttcctagtttgataggcttgtttcccatgctatgctggtcttctaataaacatttcactttcagcctttggaatctttggttgcaggtgattttggcctgccaggtccctctgccctgcttcccaaaatatacccacacgtgctacaataattattaaactcttggccaatggctaccacttcttattggctagctctgtcttaattattaacccatttctaatcattcttctcttaattattcaccttcagaaaaatgatgtagtcttggatagatttgactgagtgaaatttgcatcccttgtaacaggaaatcttctgtttctttgaatgagcattctatccccaaagtttaaatgggctttcattattcacctcctttcccttcccactgtattttttgaatagtaacctgagcccacagatacaaaaatgggcccaaaactgagctattctctttgacatttcctaggagacaagagaaaatatacagtaatcacagaccatagaaattactcttccaaagtctaacttggccaaccaatgagttcactggtattatgtacagaagcatgggtgaggggtttcttacagaagcctgagtggataaaggcagctacatcaccaatgtgtccacttttccttgtgagaccatgaaggaaagatgcctcccaggagctcatttcacaactagcttcaaggttaggaagtttctttcagtcttggagagtctcctctcccatacattgatttttgaacattgtatgtggtggaactgacatgtgaaacctctaaatttcagttttatgaaatgtctaatttgtgtttacttcctgtctgttcagggactcctttctccctccaagagggaatgtttgagttaaagaaaacttactcttctaacagttaacaagatcatcatctatatagcatgcctcctgctgagatggccctaaacagctgcagccatcctggtgatgtcagttaataaatatgatagatgagggctgcagaaagttccctagcactgccattatccaagttaacatcagggagacccagagagcttggttttagggtcggccaggttcattagcctggcacaaagttccagaacagttttgtggttacagtcattcctgcctcccatgtaccaatatgctttctgattggagcactcttagtgacctcagcctatcctcacaaggctgatactgatctgggtcaaaactaaattgtatggcctcaaagacttaaggaaccttagagatacacagcatatggtattgacagatcaaatcagtagtatgccatgacagggaacatgtaacttattctgtaccaatttattcattcatgtatatctgcatttctccatgttctctaaatggtttccccttaatcctccacattattcaactcaacataaagtttccatgattccagtcatatttgagtgtatctttgtagggagccgttcctacatatcttttttttttttttttttttttttttttttttttttttttttttttaaaatcggggttttttttgggggtggtgtgtgtagctatgaagcctatcctgccagtcgctctggagaccaggctggcctggaactcacagagatccacctgcgtctgcctactgagtgctgggccatcaaagcccagcttgagtgtatatttaaattagaatgtgtatgcaacaatatggcatgtttggaacttgtacatattccagattataatatataggaagattgagagtattttggatcggtagatgcagggaggttggtccaaagaaaggaaaaacaagggctctaggaggcaatttaaagtgtcacacactatgtatgatataaaaattaagatgcctgttgtcttagggatactattattgagatgaaataccatgaccaaaagcaacttgtgaaagaaagggttcatttggcttacatatcctgagtcaccatccatagaaggtattcaagccaaaccggcacctggaggcagatgctgatgtagggccatggaggagtgctgcttactgaattgcttctgatgacttgctcagcctgttttcctatagaacacaggaccgccagcccagggatggtgccagccaagggatggcaccaaccacagtgggctggtccttccccaatcaatcactaattaagaaaatgccctacaggcttgccacagccagatcttatgaagcattttctcagttgaggttctctcctctcagataactcaaacttgtgccaagtagaccacaccaggtaatacctttccataaatggagctgtatgaaggaatatagtttgtctctctagaggtaaggattggaaagaagtaaacttatctcacatagaaacttctctctgtgtactatgtctaaagtcactacagcatttcaaaaatttctactatattgtattatttatactaaatattcagatttttcaaggtattgatccaataacacaagattttctcttatgtatacttttaatttctttttattgaaaataagttttttgcatataatatcttctgattatgatttttccctcccactattcctcctagttcctcttcacctcccttctcatctggattcttagcttttctgtttcttgttagaaaacaagcaggcatctatgcaataacaataaagtaaatcaaaataaataaaaaacaaacaaattagaatgtgacaaaacaaccaaataagaaaaacagccccaaaaccacgataaaagtatatagacgcaaagacacataggctcacacacaccggaatcatataaaaaccccaaattggatgtcataaaatatgcatgcaaaggacctataatataggtaataatgccctaactttccagtgtgagacaaagaagtttcaatgataccattatgttcattttgttttggccatctactgctagacaagaggcttatccttaatttttaaatatatttcactagtccctatagccaaacaattcaaattcatgcttcttcaagcaatggtgaataattacaaatgaagcagtatctgtagatttactataaatttctttaacagtctttccttaatgtcctttatacacaagtcaggtctctacatgaattaacactcaaataagtaaagatattaaatattttaaagatgttagcatttcaggaaaatagaagaaatgcaaagtatagcaggatcattattctttaaagatcagattgagtttctcaattccttcaaactatccaagaattattaaaagattattatacagacaagtcttcaataaatattagctgcttgccctactgaaagtgaacattatttctgttactggtaactagccactgtagcataaaatgataacatattgttctggtctattgaaagtcagatttatcttttacaagaatgtcgtgatttgtctaagctaactatggcaactacaggcctcctcctcttgcaactgtctttagaaatagcatacagcctgttatggtagacaacacacatcttaacattgcctcagagatttcataggagattctcctacctgatgaagtgtatagattcattttatctgctcacactgctcagcaaaggtgtgttcagtagctacatcatttctggcctttctgtgagtgcatatttgccagcatagaaaatgggaaactgggtgaagcaaatggttcagcatcatccagtccatcgaggctctagataagcaaagaacaaggagggacaattttgttatctatgtgacctaagacatccatgttctcttggccttaggcacaacagttcacagctctcaggcattcagactcagacagtggctcactccatatttctatcccatggtaactgttcctcattctttcttagggccaaaggattcccagtttcagcttgtagtaagcagtcacaagatttctgcctctgttataccatgaggcaatgtccatagttaattccttttgtttgtagtgatatttagataccctgctggttcttttttgtagagaaactacacatgtaggcaggttaatcacaggagctagccttttgtttcccccaatccctgaacacatttagtgacctgtgacttctgtaaatgtacagtcatctcacaaatatgcaacatcagcaacaagctacactgacctgatcaagagggtaaaatgtttaatgtaatgaagaagaaaagtggaaacatcaaaacaaaacaaaacaaaaactaccagtttgcctccccagaggtgttcagtcatcttcacacatacagtctgatacatcaccaaaatattatacttaaacagaatgctcatggaacataaagcatatgaatattttttgcagatgttttttatttgaattagaaacaaggttattttacatgacaatcccagttccctccccctcctcccctaccaaccccccccaactagaaccctacttatcacatatcatttctgctccccggggagggtgaggcctttcatagggggtcatcagtgtctatcatatcctttgggatagggcctaggcccacccccatgtttcttggctcagggactatccctctatttggaaagggctcccaaagtccacaccaatgctaaggataagtactgaactactacaggaggtcccgtagattttcgaggtgtcctctctgaaacccacgttcctgggatctggatcagtcccatgctggtatcccagctatcagtttggggaccaagagctcccccttgttcaggtcagctgtttctgtgggtttcaccagcctggtctggacccctttgctcatcactcacccttctctgcagctgggttcgagttcagttcagtgattagttgtgaatgtctgcttctacttccaccagctgctgaatgaaggctataggattgcatataagtcactcatcaatctcattatcaggggagaccatttaatgtagcctctcctctgttgctggtgtcatctttgcagatctccagacatttccctaattcttgatttctctgcgaacctaaaatgtctccctctattatggtatctcctttcttgttttcttctatccttcccccaactcaacctttctactccctcatgtcctccttacccctcctcttctccccttctcattctcctagctccctccccctcctcctgtgctaccaaaagcatatgaatattaagtatagaaaacaactatggagaatcttataattaatcaaagcaaagggtccaattattatgtgatttctttcattttgaggtctatatagaagggaattcattcattttataaggtttataactaaaacctgatgactcatatatctaaattaaaaatttttaaattaacataggatataatagtcttcattcaaaaatatattaaatccaatcatttggaaattggcagttgaatcattaaatttctactaattactcaactagtttattatatactggtgcaaaaaatcctttaggccataagtcattaattaaaaatttttaaattagtaacaaagctctaattaaattatttatttttggaaaacaagattatgattaaaaactgcctcaaggattcgtcattactcctgttacacattaatgtaatttcataattagtaataaagtacttataattatatgaaggctttaagttcagaaaaatcacattgctttcatgctaacaattattttctcatatttataatgagtattattcacagtaaaaaccactgtgagggtgattttccttctactagatgttttctaaccagctctctgagcctctgcctggatcctgtaccaaacacaatggatccattatcaattgttgtgcttgcctgaattcccagcaatcctaggccactctgggccatcttgagagcagcgtgcatttcacagatggtgaatctcacagagccttcctctccttagcatattccatgtggtggcacaaagtttaatcccagcatggtaaggccagcatagaggagtaatacagtcagaaaacagcttatgtacacctacaaccacacccacaagccctcacacactcaggagaggtggggggagggaagcagggagggagggagggagagagagagaggacagacagacagacaggcagacagagacagggaagtactcaagttgcttttcattgacctattacacataaaacataattcagaggcagaaaagttttcgctgccacttttctccttaatcctcctctgcattcagcgctataactatcatccaacaatgaactaaagatgtccctaagtgtatgtctattaaagcaggttttctaatccaaaattttattaaacttgacataaccacatttttggtttcagggtacctggtgtgaaatagcatctaattgtagagaaatctgcattcctttgctggaaatgtatccttctgaatatttttatagcttttagacataaattattagttttaatttgtatatatactttcatcaggatatttattcatattatttgacaaatttatctctttattaacataatttgttatagaaaattccctttactgttaatatttaagttttttcaatgttgataattgtatgtttatatgcttgacagtatatactctgatggtatcatttacaactgttatttttgtttaattttagtttttttctttcaaaggtaacttttcctcccagaattattattttgttacataaggtatgagcattgctagcctatgattttagtatattctctctctctctctctctctctctctctctctctgtgtgtgtgtgtgtgtgtgtgtgtgtgtgtgtgtggtttnnnnnnnnnnnnnnnnnnnnnnnnnnnnnctttggaggctttggagcctatcctggcactcactctggagaccaggctggcctcgaactcacagatatctgcctgcttctgccgcccaagtgctgggattaaaggcgtgtgccaccaacacccagccaagtatattctcttttttacatttctaattttcacattattttacattccttcctcatactatttctgttgtaaacaaaatttgcacaaaattttgggacaatttctccaaaaagcattactatctactttttttccattgtagcagttataaattgtattgtttctttatattcaactgttcttatgtttgtatctccttatttttctctctagaacactgatgatatctgcctggaaatttgtatgtgacttgaagatagatgttttcattttttcctttggtaacctagttttaatttatttcttttgcttgccttattgcactgactgaaatttcgcacaatattctagcaacagtcatgagagtagacagcattccttttcttactggtcaaaggagaaaagactcattacttacctttcaatataaacccagccagagttgctctgtaagtggcatcatgggcttaagaatgttttaatgtattcctgtattatctgatagcagctttagacagatgatgaattctaaatattgttctttattgttaagttatatcatgtatttttcttcagtatgttagtgtgatggagcacacacattgatttttgaatattgcattatattctgtacctaaaatatatactaattattagttttatgaaattctctcttttgccttatatttacatgtatataaaccagagtctcatgcatccatgactagataacaatgacacagaacttcagaactttctttccccatatcccaagtagtggtataataggcctgtaccaccatgaataaatcatatggggttgatagttgaacacagggctttatgtgttatatagtcaagaagtctaaccaatgggctccaaaccaaaagatatttcataccgtttagaagaatttttacccatatttgtaagagatcctcttatgtctgtattggtaacatataacatcacagtaaaatttgatgttatcataaatttcgtattttgaaattatttctgaattcttttttttctttctccagattttttatttgaattagaaacaagattgttttacatgacaatcctagttcccttctccctctggtcctcccctaccacctgttcccaactaaaaccctacctatcacatatccattctgctacccagggagggtgacgccttccataggggtcatcagtgtctatcatatcctttgagatagggcctaggcccacccccatgtgtcttggctcagggagtattcctctatctattcctctaatgggctcccaaagtccacacctatgctagggataagtactgaacaactacaggaggtcctgtagatttccaaggtttcctcactgaaatccatccatgtccctggggtctggatcagtcccatgctgttatcccagctatcagtctggggagcaagagttccccgatgttcaggtcagctgtttatgtaggtttcaccagcctggtctggaccccttggctcttcacttgtctgcatctggattctagttcagtttgatgattatttttgtgtgtctgcttctaattccaccagctgctggatgggggctaccaggtggcatataagtcagtcaacaatctcattatcaggagagggcatttgaggtagcctctcctctgttgcttagattgttagctggtgtcacctttgtgtatctccagatattcccctagtgcctgaattctctgtaaatctaaaatgtctccctctattatgatatctccattcttgttatcgtgtattcttcccctgactgaaactttctgctccctcatgtcctctgcatccctcttcttctccccttctcattctcctaactccctccccccttttcatgtgctctcaatcagcagatattgaacctctccccttctccaggggatcatgtatgtctctcttagggacctccttgtttattagcttctctggtattgtggattgtaggctggtaatcctttactctatgtctaaaatctgcatatgagtgagtacataccatgtttgtctttttgtgattgggttaccttgctcagaatggtttcttctagttccatccattttcctgcaaatttcaagattccattgttttttgttttttgttttttgttttttttcttttttctgctgagtagtactccattgtgtaaatgcaccatctattctctatccattcttcggttgaggtgcatctaggctgattacagtttctggctgttacaaatagtgcttcagtgaacatcgttgaacagatgtgcttgtttcttgaatgtgcttcatttgggtatatgcctaagagtagaattgctggatcttatgtagattcatttccattttcatgaggagttgccatactgatttccacagtggttgtacaagttggcactcccaccagcagtggaaaaatgttcccctttctccacatcctctccagcataaactgtcatggtgtttttgattttggccattctgacaggagtaagatggtatctaagagttgttttgatttgcatttccctgatggctaaggatgttgaaagctttcttatgtgtttttcagccattttagattcctctattgagaactgtctatttaattctgtacctcacttttaattggattgtttggtgttttggagactaccttcttgagttctttgtatattttggagatcagccctctgtcagattgtctatacattctgcctggccaatcagccaatcagggttttattcatcaaccaattagaaacatatatatagaaagacatctcccttggtgtgtgtgtgtgtgtgtgtgtgtgtacattcatatatttattgatttgcgctgatagttgattagtgaaagtttggattttgtcattgtttatgattggtgtgcatgttagtgcttcatagaaaatacatttttacatttttgctcaatattctttgcttgctcagtccgatccattttgacttaagttatgtacatggtgataggcttgggtctatctcgagtcttctaaatgtctgcatccagttttgccagcaccttttgttgaagatattctctttgttccatcgtataaatttgcattgtttgtcaaaaatcaggtgttcataggtatgtggtttaatatcagggttttcaactctattccattggtctacctgtctatttttgtgtcaataccaagctgttttcaggactatagctctgtaatagagcttgaagtcagggatgatgatgcctccagaagttcctttattgtacagggctattttggctatcctgggtcttttgtttctccatagagagttgagaattgttttttcaatgtctgtggacaattgtgttgggattttgacagggattgcattgaatctgtagattgcttttggtgctttctattctcaaggtttgtggagttcatgtctaaatttagagtgaagaagagctaacactgtttcctgccggattagtgaagcatataattcttgctatgccatactgtgtcattcattgtttcaattgcaacaaagcattccttttcataatagggacttaaggatatgttcttttcttctgacccttttattatgaatttaaagacctatctcaatgccagtgtacttggaatgaacctttgaggcgttggtgatgcatgcctttaatcccagcacttgggaggcagaggcaggcagatatctgtgagtttgagtccagcctggattccagagtgagtgcccggataggctccaaagctacacagagaaatcctgtctcacccccccccaaaaaaaagagaatgaatatttgaaacacagtaggttctcaaactttggaacgaaaattttgtaaaatatttttaagttattaataaaaataagtcacatatttttccttatgagtaaggattgtgtgtaatcattaacattatcttgtggtgcacagcattggaataatctgcaatgaaaatcagaagtgaggagggctactgacattgtagtcacagtaatcagagggccactaaaagacaatgtgtaaacaaaaattctgagaacattaaaatgtatccccatgtagtttttggaaaaaataatgaaatttcagaagataatattctgaaatataattgtagagtccaagagagcaacactctaaattggtgttggaaaatattgtttccattaaccatacattttcctaacatgggtataatcacttttgcttggttaagtttcacatcatgactgcatagtttaaaactgtttctcttagttataccattactacctaaatatacaagtagtaactaagtaaatagcaatcacattacacaatagtagaattttcttcattttattactttttatttcttttcataattattttcctgatatttaaacatataactttgtgtataaacatacacaaatatagaaagtatttgctcatttaaataacaccagattcaaatttttctcaaagaaactctcaaagattaattgctgcatttgtttatcattccacaactaaacatttgcattgctataaattttgttgggtaacctttcctaaaatttcccagaatgttccctttcttagtcacttaattttaaataaaaaataactgaagaaacaacatgatataggtgaaaaggagagaatacctcagcatggaggatggtgtttgcaaataggaggtcatttatgaatgtaaatggtagatgatatttgtgcatatgtgtgtgtaacaaggttctttctgccatctgttcccaaggccacttcagccccagtgaacacacagactatattatttttaaaacatgttaactaatgactaggacttattattggctacctctgtcttaattactaacccatttctattaatctaagtatttccatgtggtcatatcttactggagaagggtctagatctgctacttctttggtggcctacattgcaattccatctgcctatgttttctggaattctcctcatctcctagccctgtctatacattctgcctggccaatcagccaatcagggttttattcatcaaccaattagaaacatatatatagaaagacatctcccttggtgtgtgtgtgtgtgtgtgtgtgtgtacattcatatatttattgatttgcgctgatagttgattagtgaaagtttggattttgtcattgtttatgattggtgtgcatgttagtgcttcatagaaaatacatttttacatttttgctcaatattctttgcttgctcagtcatgtttacatgataattttaagaaaatgtggaggtgtgtgttgggtgaggtagttcacatagctgacgcatgaagcatagatacatgttctattatacttaatgattgtcttagtgttttattgctgtgaaaagacatgatcaaagcaactattacaaatgaaaacatttaattagagtggctcacttacagtttcagaggtatagtccattatcatcatgtggggggcatggaggcatacaagcagaggtggtgcttgagtaatggttgagattcctgtatcttataggcaacaggaagttgaccgaaatactgagtgtatcctgagcataggaaacctcaaagaccaccctcacagtgacacacttcctcctgcaaggtcatacattctacaacaaatccacaaattgtagtagtgtcactctttatgagattatggcgggggaagcaaattacatgtaaacttagtagtacattccactccctggccccataagcttgtaataataccaaaatgcaaaatgcaattagtccaacttcaaaagtctctatagtcatcatctcagcaatgtgaaaagttcaaagtctcttctgagattcatgcaatctcttaactgtaataccttttaaaataaaaatttaaaaaagcacatgtttacaacatataatggcacagtatatatagtaccgttataaaacatagataaggaagcatagtgaggaaatactggtccaaagaaaacctgaaaaccagctgggcaaactccaaactctgtatctccatgtctgatttcaaatcattcttcagatctccaactccctttagctttgttgactgcaacttgttatgaaaagcaagttatttttaactttgtgaagctgtgttatatttgtttgattaaataaaattaacccgaggccagaaggttgagtaagcaactagccaacagaaaatagcagggaggaactaagtggagctagcatattttagcaggcttttacctcagcctttgaatcgttacttctatagaaatttaaatgaagtttcctttagcagtcataatagaggagaaagagtgcctgctggaacagaattccctcctagctgcagccattgcagcatatcactgctggaagctgctgagttacattgcaggttgggaaaacaattgcttaaggtgcagccactgtattgaaagcataaaacagcaaaatacttctctctcttggactagttcttcttcctgttagcagctctcctcaacaggtatcccatgactctggcatccctaacatcttgggatctgcctatgtttttgttggtgtagttatcttcattggtttggagttttccttccaggactttcagtagggatggattagtggatatgtattttttcaatctggttttgtcatggaatatcttgttttctccatctatggtgactgaaatttttgctaggtatagtagtctgggctggcatctatggtctcttagtgttggtattatatctatccaggactttctggctttcagagtctccatggagaagtcaggtttaattctgataggtttgcctttatatattacttggcctttttcctttgctgtttttaatattctttctttattttgtatgtttggtgattaggttattatatggcaaggggacttttattttggtccactctatttggtgtttggttaacttcttgtactttcattggcatgtctttctttaggttggaaaagttttcttccatgattttgttgaatatgttttctgcaactttgacgttagtttcttcagatttttctatatgtattagtcttaggtttggtcttttcatggtgtctcatatttcctgaatatttttgttagggatttgttggaattaagattttctttggtcaatgaatctatttctcctggtgtatcttcaatgcctgagattccctctttcatctcttgtattctattggttttgcaagcatccttagctcctgatcatttatccagctttttcatttccttcattccctcagtttgtgttttctttattgtttctattacagttttcaggtcttgaactgtttgaattgttaatgtgtttgattattttctttctccttttttggctttctttaagagatttgttgatttcttgtatttttggtttgttttctcttccatttatttaagggattttctcatatcctctttgaggccctctatcattttcaagaagttgtttttaagatcattcttttctgcttcatctgcttggcatattaagttcttgctggtggagaatccctagactctgctggtgttatattggtttttctgttgttgaatattttttatattgtcttcttccaatccattcttccagtggatgcagttggagtctctacactgcaggtgggtatgggtccaaggttctcttccagtaggtgcaatcatgtccaatactctgatggctttctgcttcctgtgggtagaggaaggactagtcccaggaagttggcagatcctggatgggctcttctacggggacacattcagtgtgatcaggccccaatcctcaggatgctctgagcagggtaccagtagtcaggccagaaacagggacaggctttcctcctctgtgtgtggaggtgtgtctaggatgctggcagtctctggatgggctggcacacagggctgtgtttcccagtgcacagtccccaggcctcaggactgggtaccataagttgggctggaaataggctgaaccttacctcctcctgtgggtggaggtgggactggcatgctgacaggctctggatggggtaatccactggaataggttcccattttcttctttttttaaattgatttgtttaatttagaaacaatattattttacattccaagcccagttccctcttcttcccttcttctcattcaccccatatctctccaccccaccccatatccactcccctgggagggtgatgccttctatggggaatcatcagtctgtcacataatttgtgggaaggcctaagccatcctccatgcatctggggtgagaaagtatccctccatgggaaatgggctcacaaagtccattagtgtgctagggataaatacttgtttcaatgtcagagatcccatagacttctcaggcctcctaactggtacctacattcagggggcttggttcagtctaataatagttccccagttttatggctacagtctgtgggttctcacttggtcaggtccgctgttaatttgtgtttttccaacacagtccttttttattttagaggcactcatatttacatatccatccatccatccttccatgctctccccaaccccccaatctatccttctcctttccagggatagtgaggccctacatgggggaccatcaatgtctatcatatcatttggggcaaagcctaggccctccttgatacatctgggcagcaatagtatccctctatatggaattggctcccaaagtctgtttgtgctctagggacaaacactggctcttctgttagaggtcccatagactgtctcagcctcctagctggcacccacattaggagggattggttcagtccaatgctggttccccacctttatgattagagtgtctgtgttctcactaggtcagaaatccactgtttctgtgggtttctccagcaaagtcttgacccatttgctcatgcctcctccctgtctgcaactggattcctggagtttggctcaatgcttaggtgtgtatgtctgcttatgtttcgatctgctactggatgaaggttctaggatggcatataaggtagtcatcaatctcattataggggaaggacatttaaggtagccccctcccactattgcttagattcttatttggggtcatcgttgtagatctctagctattttccttgtgccagatttgtttttaaacctataatcactccctctaataaggtatctcttttcttactctcctctattcttcctctgactcagtcttcctggtccctcatgtctccccacatgtctttttactccccttgtctttttactccctccccctccatttggattgtgttgttctgcttccttccccattgttctgcttccttcctcattaaagccatgttctctctcactgattttgtcactactgcctttgcagagaaatgatttctcattgatatacctccattaataaaatgttgggagaggattttattaaggtttgtaagaaagacaattcatatctcccattgaaatttggaatagatattgcatgtgaaggtaattcctctgcttcatttgtctactttttatctgaatgttatattttcaaggaattttttattttcccaaccatgaaagatggttatttactgaatatctttttaaaaagaagttttaagtaagaataacttcaatttctttaaagatatcagtgatatatttcactgtagaacatattagtttttctttaaacatgatagtggcatattaagtttatgtctttcaaaatagaaaagacaaactagattcttcccatactgaagtgaatctttcacttttcaccatacaatgtagatatgtagtatatgatatttttattcttctctcatacaacacatcatcactacagctataatgaaatgtactactatcatttaaaaacacctgaaaaattctcaaagacccccttctacttaagtcagtaagttgtgcccaagcattattaatagttaatatttttcagcaaacatattacataatttagataatgaacacctaatacctcatagctttgttttgttaaaaataaagtgaaaaactaccagggagagataagggaaagaaaaatggataatagaccagatataaaatcagaggattaaaatttggtggagaaaaggaccatgaagagtagtgatgtgatagagtttgtgatgttgaatgaaagacaaaaccggatatggtttaattatttatggatagtaaattatgtaattatagcacttactttataaggtcacttgagaaaatagtgaaagtattttctaaagtactgtgaacagataaatactcatctgcattcaataggatgaagcaggtaggactgcttcaaattcagtcagagtgaataaagcatagtagattcattgatgcacagtcatgcttgtgtagcagatcctggctgttattccagggtcttcacaatcataagaataggttggcacctccaggaacaatggagagagatactcacacttcagcaatggctgattctttacttacataagcatagaaacagaaaacagtgtagtgattggcagatttttctagaagctgtgagagaggttctttgcttagcataatgtctcttctctgttcttgaaagacaaattcatcaaacaacccaacaagcaactaattatctaaccaaccaagtagctaaccaacaaaccaactcctcaccaaacagacctactaactaactaagcaatgaaataaacaaacaacaaacaaacgttcataataggatttgagtttactatcacagaatggggtatcattaattttgaaaaataatataattttagttttttcctaactattgttcactcaatgcacaatatttttctgaagcatactttacataattatggataatcttcctgcaaaataaattcttttcttataatttattttccataattataattctgagtattatataaaattttctcaggaaatatagggttcagatgaattattgaagcaacaattaaagccataggtctcagaaaagaaacacattttaaggtctgagaaggaacaagtgagtcacctagtttcctaattatctattatgcactgctttgacaattccagtaaaatagccccagagaagaactctatatatggatgaaattcattacttgggaaacattgacagctctcaaaacaattgatttattgccttttactaatcatgatggtatggatgatgcatatgtgtgcagaaacagtacaaataggagaatatgcatctaaactgtatgggggatttaaggaaatttaggagagttgaagactgttaagcagtgatcttgtctgaatttttcctaatatgatagactctgacatagagtggattgcatttaatacataataaagggatgaataagacatatctgttcatttaagaaacaggagatatgacctgtacaaggggaacacttggttcccagactgatagctgagaaaccagcatgggacttatccagaccccatgaatatggtgtcagtgaggagacctcagaaatctatggggccttttgtagtagctcaatacttatccctagcataggaatggactttgggagccattccacatagagggatactccctgagcctagacaaaggagatgggcctaggccttaatcccaaaaggcagactctgaaaaccccttatggaaggactcaccctcccttgggagcagaaaggggtatgggataggtagtgtgttagtttgggggggcaggggaggagggaaggcagagagaaatgggattgacatgtaaaataatcttgtttctaatttaaataaaaatggagaaaaagaaaaaaaaagaagctttttttaggaccaaaacttaattgttttcaacagttacatcattaaaacctgtgatattttcttaagaaaataaaaagtaagaaacaggagatatacgttaaactactgattgttttctagataacagggaacatagctaactaaattcatgcaattccagtttctgtgagtatcatagtgacttggtggagaacatgagattaagtaaaacacactattctgtaaatcactggatgcaacattttcttctactcagaagtgaaaatcattaattcttttatcctgtaagttactttttatatgtatgataaatagatatttgaaatgggcttttacaaatgtgggtcaaatctttcaacacacacacacacacacacacacacacacacacacacacannnnnnnnnnnnnnnnnnnnnnnnnnnnnnnnnnnnnnnnnnnnnnnnnnnnnnnnnnnnnnnnngagagagagagattgagaaggagaatatccttcttggcttccctagtctttaccttataactaactcttaggctgttcactttctcatggactccctacccttttctgtatgcatctgcataagagctatccaagcttctttttcagccccctgttcaggctcactgggttacttcatagggtgaaaagtgtacaaacacttgtgatagttccagaagtccccagtgacattatactgccaggtaagttactgaatagtttgttttgctggaataaaaaacaatgagttttgtaacaatcacaagtccttaaaacatctcattcccagtgctagttttcatgcattactattttaattaagctcattgtttgataatttcatacatgtataaaatgcattctggttactatctagccccacccatttttacttccttcttatctcaatcaaggccccatcaccacatgtcttccccatattcatgtcttcttttattttgccaaggactagttgtgaccactggtgcagagctattcaccagagttgggcaagctcactatgggaaagctactgtggaacccactaagtttaccaaaggtgagttgtgacctgtggtgtggagttacccactggatttgggcaggatcactgtgggaaggcaactgtacagcctatcctgagctacccattttccaaaggctcactgtacttcaaccctgcatcaggttgactcttttcaaggattttggataccctaatctttgaatttttcaaattctacagcaaaatcagataacagtaaagtttttgcatttgttcctaaagacttattgataagagttaatgttttgagacaagtgaatcatgaatattcccaagggacatctagagtttgtgaatttgtgaaattcttcttgggcagctagtctgtcatgtattcttcaggatgtataacaacatttccttttcctcaagcatcttttatgaaagtaattttagtttaatgttagagtaactgttacagtattcagttaatcttacataactacaatttttcatagtccataactataagaatcataagttgattttatgtttgtaatgacccacctaaatgatgtaattttatctgtttgaaaataggatattatgaattttaaggagaaatattagttatatttatctttctacctttaaagtaccttttctacctttagagatttcttaagcattggtttactttgtgtgtgtgtgtgtatgtgtgtttctctctctctctctctctgtgtgtgtgtgcatgtgtgtgtgtgtgtgtgtgtgtgtgtgtgtgtgtgtgtgtgtgtgtatgttaaaaaggaacagacatgtgctgaagagtgtgtatgtaagcataagtaaactttgagaagtttgttctttccttccatcatgctggtcatggtgatgaaaatcaggttatcaaagttagtcatgactacatttacctggtgagccatctgtcttatgcctttgcttatcattgatgcctttttaatttgggtgtagaacaatgtggaagatagactaggcaaaacagacacaacagtgcatttgagaatgaagactttcttgtcagcatttccatatcaaatcaacatacagaggaacacttctcaaattttggagatctatgtttaaatataacaaaggattattttttcacagtcccagaaaaaatgtatacctagtatccatttagtttgctatatgtgatagggaaatttttataatatcttattttatactatgtaaatgtttctgtacttattcaccactgtccttatagactactgataaatttctgaagcatacaacagagtcaaacattggacatctgagagaacaacatatgtgtcagcaagtaatgaatgctaaagcctcagagaggagtaaggcatggctggcttgtcccagtgtgatggctttcacactgtttgaagctttagagaacttaagaatgagtgctagctgaagcgtcacctcagtaggtgggcttaggaaatttcataagaccttgccaaaggaggctatgagggagaaagtagtagatgggaagtgagcagatggcacttcttaggatggcaacaggccctggagggcaagtgagtataaccacaaaggcttcaagacaatactgtggagaaggagcttttgtaagtagtggagtggggaaaacagtttcagagttactggatttgacatttcattaagctcctacctaccctctacttactaggctctagtaggaccacaaaaataaccaaataaattaaatatgcacctattcatatatgtaccaaacaaaattaaattctttatgacatttttgaataaaacagtttgaacaaattttaaactcactgatcttttttaaaatattttgaggaatagatagatttatttcttcattttgcaaacagtcattgcatatgaattgattagttagaaaactctggtcagtagattgtttcactttctaaatagccgatatatctaccctgttgcatcactttatacagaatgagttgactcattcattcatttcagctcttgagtaagattttccaaaagttcagcagaggccattagattccctaaaatatttcctaagaggctagagctcatgaattagattctctatgcagagaactctgtagttaacaagagatggagcagtcaaagatatctgtcaaggggaattgcttcttactgatcttattctaagcagacatacaggttagttcactttctcactcaggctggagcatcccaccaatcatatggttccaaattccttagcatataagtatacttagtcaagctgcacaaagtcagttgaagggaacacagatgcaatccttgctggttgttgggactgtacaactaagtcctgagattctgattgaatatatcatctcaaatgtgcttgcgttcagagatagaaacaattcttcccagcatggccattggaggctcagttctgtgcatgcacctgtgattgttgggggaagtgccacaatttgtcttatgtaagctgccttctttcattctgaagcatctattggggaaacttcattgattttttgggggtgggggtaagggtttgtggtataagctgattttccttttgcatctcccatttagccagagaaactggttcactcctggagaagactaattctcctgcttttcgaattcctnnnnnnnnnnnnnnnnnnnnnnnnnnnnnnnnnnnntatgagtggaaacctgtggtaattttctttacacattagtatgtaaattggtgctgttcttgttgaagtcttatttagggagccatattattatgatattataggtgagattccctgtcatttctcacagaagcaaactcactgaatacttttgcctttttaaaaaatttaaattagaaacaagcttctttttaatgttgatcccagttccctctccctcccctcctctgctgtccctcaccaaaaccctatcccatcccctttctgctttccatggaggttgaggccttccatgggggatctacagagtctgtcatattatttggagcagggcctagaccctcccacatgtgtctaggctgagagagtatccctctatgtggattgggctcccaaagtccatttgtgtactagagataaatactgatctactaccagtggccccatagattgtctagacatccaaagtgacttcctcgttcatggggtcttgaacagtcatatgcttgtttcccagctatcagtctggggtcaatgagcaaccacttgttcaggtcagctgtttctgtggtttttctccagcctggtcctgaccactttgctcattatgggggtttttgtttgtttttttgttttgttgttgttttttttttttttttgtattttgagacagggtttctctgtggctttggaggctatcctggaactctctctatagaccaggatggactgaattcacagagatccacctgcctctgcctccagaggttagggattaaaggcttgtgccactgatgcctggcctcctcactgaacacttttaacctgcacttttaaatcaatatctaattttttaaaattctttaattactactcatatttacacatcaatccccccattctcttgccctcccattctcccatgttccccaccaaccccccaacccccccaactcctccccagggatggtgaggccctccacgggggactgtcaaagtccattatatcatttggtccaggccctccttgctgtacctgggctgcaatagtatccctccatagggaatgggctcccaaagtccatttgtgctctagcaataaacactgcctccactctctcatagactgtcttggcctcctagctggcacccacattcagagggcttggtttggtccaatgttgtttcccagccttatgactagggtttctaagctatcagtaggtcaggtcaactgtttctgtgggtttctccagtcctgtcttggctcctttgctcatccctcctccctctccacaactggattccagtaatatggttcagtgcttagctgtgtatgcctgttcctgcttcaaacagttactgaatgaaagctctaggaatggtaaccaaggtagataccagtctcattacaggggaatggcatcaatggcatcctccccaccactgcctggattcttagttgggttcatccctgtgaatcccctaatattttccctgtgcaagacctctctctaaacctgtactgtgtctctctctatcaaggtatctcctttcttgccctcctctattcctcccctgtctcagtccacttgttctccttcccctccccttctacttttaagatccattcttagagcttcatgaaacttctttgcctcccttgaataattttttgaaactgctcacttttttcccaatttgaaagcctgctttctgtatttatatatgtgtttttagaatattcattctctctgagttttttcttctttccttgtctttaaatctatcaccatgcacaaaacttaagtgcaaaggatcaaagatatcatcataaatccagccacactgaatcttctagaagagacagtgggagatacccttgaatgaattggcacaggagaccacttcctgaacataaccccagttgcacagacattgagaccttcaatcaataaatgggacatactgaaactgagaagcttttgtaaggcaaaggacactgtcagtaagacaaaacgccagcccacagaatgggaaaagatcttcaccaaccccacatctgacagagggctgatctccaaaatacacaatgaactcaagaagctagacacctccatttatttaagggattttctcatatcctctttgaggccctctatcatttatgaattctctatagaggaatctaaaatggctgaaagacacataaaaatgtgctcaaaatccttggccatcagagaaatgtaactcaaaacaactctgagatatcactcacacctgtcagaatggctaaaatcaaaaataccaatgacaatctatgctggagaggatgtggagaaaaaggaaccctgctccattgctggtgggagtacaaacttgtaagaccattctggaaatcagtatggcggctgctcagaaaaatgggaatcagtctacctcaagatccatcaatctcttgagcatatacccaaataatgcatgttcatacaaggacatatgttcaaccatgctcatagcagcattgtttgtaatagccagaacctggaagcaacctagatgcccctcaactgaagaaagaatagtgaaaatgtggtacatttatacaatggagtattactcagcagaaaaaaaagcaatgaaatcttgaaattcacaggcaaatggatggaactagaagaaaccatcctgagtgaggtaacccagtcacaaaaagtcaaacatggtatgtactcactcatatatgaactttagacttatagcaaagtattaccagcctacaatcctcttcaccaaagaaactaggaaacatgaacgactctaagggataaatgcatctaccccaggaatgggaatgggcaggaactcctgagctaattgggagcaggagagtaggggaacgggagctgccataatgagagcaggagaagaggagaggagaggagaggagaggaggaaatggaggagcagaaatattgagttgggggaagaatagaggagagcaggatgagagatatcatattataggaagccattataggtccaaggagagatctgacactagggagatttccagagagctacaaggatgacactaactgtcagtccaggcaatggtggggaggataacataaatgcccttcccctaaaatgagattgatgactggtttttatgccatcctagggctctcatccagtggctgatggaagcagaggcagacatccacagatatacactgagctgaaatctggatcttagttgcagagaggaaggaatgaagattgaaagggtgggtaccaggctgaagaaacccacagaaacagctggcatgaacaagggggaacacatcgaccccagatgctgtctgggaggccagtacaggacttattcagacccctgaacatggatggatgtcagtgaggaggcctctggacactaggaggcccctggtagtggattagaatttttctctggagtaagaagggaatttgcaagcccatctcatgtgaagggatgcactcttgccctggacacatggggaagggcctaggcccagcccaggatgatgtggtggactttgtggagcccccattgatggccctaccctgcctggagaatggagagtggatggggaggggagtaggtcgggagttgagggacggagaaggagaagggattgacatgtgaaacaagcttgttcccaatttgaactaataaaaaaattataaaaaataaaataaaataaataagctttcttaatagtggctatttaatgaaagggatgatttaaatttaatattacctctatttttttgcaaaacttaatttcatgaataggatttctctgtgcctgtgttgtgcatgaaatcaatttaagataatctgaaggggtatagatgtggatctgttgatagaatgcttagttaggatacctgaacccagggctgagtcctgagcatgatggtgcaagttgtatttcttgaccaagaattcaagatcatcttcagctacatactgacttccaggccaacttggggtacacaatatcatgtctcaaaataagtaaatagaaattaattaagaaaaggaaatgaaacaaaaatatttattccataatgtatgatgcacttctcatatattagatatataattcatctgaaaacattttatggtatgaattataagacaaatgtaatatgatatacaatgtgctgaacatatatatgatatacaagaaaatggtatattttagaatgtcattttaaattttgaatcatcagttttcttttttatttgggggggaggttttcgagacaaggtttctctgtgtagctttggagtctatcctggcactcgctctggaaaccaggctggccttgaactcacagagatccacgtgcctctgccttccgagtgctgggattaaaggtgtgtgccaccaacacccggctagaatcatcatttttctttggtgcaacagcaatataccatgtccaggaatacaaatccaacctaatttgtaatgagttagctctacttcaagacttcagctgccaactttggacttttcaagttctacaattctcttaaatcatacacaaaattagaaaaatgtgtgtgattacagagtccagtttatataggaaatatgttaaagtcaggcaaaggatggtaaaaggaggaagagtgtggaataataacttgtgcaattactggtgatcatttgttccagagagcatggatactgttattcccacaacgccttttcttgatgaaatacacatgaaacattgtgctaactacaggtgaccagctcctaaaagctcaagttattgacttcacttctttggaggttgaagctcgctttctttgtctcaaattctctatcttctatcagataactagatttaaacagggtgatacttgaaatgcccagataaagaaatggaagactcatatacagtatgctattacaaggacttacggctggatttctaagttttatcatgatccccatggtatggaaattgccctcaaccagtaggaagcagtttggaatgaacgacagccaaattcccaaatattgtttatgaatgtttattttgttcaaatggggttggttataaatggtaatgatcacagtcaatttcttttttaaaggaaaaatgggtgaataggatatggaggtaaatactttacattgatatggattttcatttattgatacaaattcaaggtcaaatttgtgttatgctttaagtgaagattatatagtcacctataatactcaaaaattataattagtttaattaggttttctagatatacagagatgtagttgagatggactggtattcttcaaacctttcaaagacctacagaatatatggcatttaaatggtttagggtttttcttgacaatgagaaacaactgctcctggcacaccaattgagtcagaaaggaggatgggcataaaaaaaactccttatagtgtttgctttcaacatggcaagattagccatttaggcaataaactgctcttgcctggactgtttgttgctatataaattagacatactcgactcatgagaaagtgactgctaaacttaaacaagacagtactaaagggttcctgttgaaatggagaagtgtgccagacacactgtggcctataggctgaagatggatgccccaacattacagaggaactttgggtggctgtccaggcagcaagatgtctctgttagttctagattttatatattatcctgtgttctttgatggaattgaagacggatagttatggttatagttttcttcatttattataaaagataacttacccttctttttatttagacaaaaaagaggataggattggggaggtccttctgtgtatatgattgtcttattggttgatataaaaagtactattggccaataggaaaacgagataggtgggactaggtgtcaaacaggattctgggaaggtaggagaaagcacagaatcaccatgtgagcccaggaagacaggatgcttccactggcgtcaagtaagtcttttaaaatatatagatttatgataattaagactgagctagcagatgagaaatcgtagtcattggccaagcaatatttgtacctaatataagtctctgtgtgttacttgggaccatatcatggtggcaggcgtaacatgggtggcctggtggaaactatccacatggcagcagggctcgggcagcttggtggaaagagttattaccactatctattatgtgagggtgcacactacacctacttagttattgcaaattctttagtgcatactccatcacctgactttgtattcaaaataggtttagtaatgcattgattatatgttgtttaattgcaaaaagaaaatcaaggcatattgtggcattaagactgaactattaatttcatgcatttactcataggtggattgataacattcagcatcatcaaagattctgtctctatgagcagtgaagaatgtcttaatccaccaagttgaatgaatctgcagtagctgtgaaagaaagcactaatctctagtacttcttacttctagcttctcctcatgctgtgccagcctaatcaaaggtttgctttcaatgtaggagggagtcttgtagagagacagtgtgcagagcagaagcttccatacatcaagtgtggggttagtcacagtcatttctccaagtcctaaacacaaacgtgttagcatttaaagacagcttcagtaccactgaaaaaacataaacttgtctaaaaattgatttttcagaattcacaaagcaacacagaaggcaagagaaacaattcctcataaaattaaagtggaaccaaatcataaatgagatatttctatttaactggttacttgtacttaactcttattgtgtatcatttgactgaaataaactatttcattttgtcattggtttgttttcttaaatacactaatctgaatattcctggaaatgatttattttgtgctgcattatcactttttggcttatgacagatgggagctagggagatgcatgtggcttcatgactcttctttgttccttcacatacagccatgttctatactgctaagcacagcctcaactccataaatggggtttctaaataagatgcttttctcttcttagattcatggatccatttgttacccctatatgacaaaagtattgagaaacagatgtaaggaaaaaaggaagaagagacaaaaaaccaactggataagaagaggaggtggtgttggagataagaagatataagagaagggggcagaatcatgagaaagaaaattaggaggagaaagagaaggatgaactggaggatggtggaaataaagaagcatgagacaatggactgattaaacccagtcatcagtttgaatctcacttagaaaccaaattagcagttctccttggacaaatcatgaaattattttttaattcaaataaaaaagtacttctaccaccctggtgccgggtaacaggtgccaggtattgcaacaggaaatagtactatgaaggagaacttgatacccacagccactactgctggaaatcattgaactcttttttaatcaactacttgaacaaattctctctctctctctctctctctctctctctctctctctctctctctctctctctctctctgtgtgtgtttctctctttccccccctctctgacacacacacacacacacacacacacacacacacacacacacacacacaaacacacgatgaattctattttcatttagcataatcaaatatatcacatatattttcttttcagaattttctttttcaaaattttgttcttgaaacaggtaggtaaaattgcaggcggtccatcccctttagtgatgttggtgaaggaatgtaaagctttttcctaatctggaggattatacgatggttgctgtttattcatataaatcatgttttgtcatttagatgaaatcaccaaggaggtcagcctatatgcatgcccatggaagatcaaatttatgtggtgaactgatgtactaagactctcctgctgtgggtaccattccctgggttgggatcctgaactatataaaatgagagtaggctgaaaacaagaactaatattttcttgttacttgattgtggatgcaatattatctgatgattcaagttcctactgctttgatatccccactatgatggactgtgtccttgaattatgaaccaagatcaactttatcttccttaagctgctttggtcagaaattttatcgaggcaatagcaaaatacaaaaaggcaggcattatagcatttacatattttaaaaaatgccttgatttacttttgattaattagactaagagtccctacaccatcatgtgcatttctgtaagaaagtagaaaaattagcagtgatgaggataaaggaaataactattgtcccacttcatactacagtggtacaaataaagaatttcataccacaccagtggttaaaataataactgtgatatttcagcagaactaaaatctgaaaagaaatgataggtgtcaagcaggactagtacagagaaagggattcgtactaatgtctctttgtccttaacaggatgatctaagtgaattggaggatatgctattatcctcactgagagaagcacacaaaccctttatatgactcagagaagagagaaaaagattggtggaggtcactggagtgcaggtttggttctgccatgcagtcagatgatatagatgcccagaggaagtgccatatgctccaggaaaatgtatatatactttattttaaactttccaagttcttggaattttatttctcaacctaacctagaagtcaccagaaaaatgtggaatatttactgtgtgtattttgtgtgtatatgtatgtgcaggcctatgtgtatcattatgcttatatggaagtcaaagtacaatttgcgagagttgcttctctccttccagcatgcaaagtccttcgggtctacctcaacttatcaagcttagcagcaagcactgcctatccatagccttggctactagaccattttgtgtttactgaatgaaatgcagtgatttgactatcaattccattgttaggttataaaagtctgtgatgccccattttggggatttcattaagtctttttatcattctaaatgacagaattaatatcattgctagtatttacaagagcacaacccaagacaatgaagtatcttacttcattaattaaattttgatccatatttatgaggatcatttgtgaggctagttatctacaattaatatgtaaagccacataaaatacaggaagacattcagagaatcttgactttcaaagaatgaatatataagtatttatttttttttaattttaactgtttagtattgattatatttcatcaacaatcaattaataacaccaatatttgtaactggaaataggatatgccataattgggagcaaaagtggaggaattatatttggaattctttgagaacagattaaacactaacatgcaagcaagcaaacaccacaaaaatcaacaaaacatttaaaattcaaaaaaaattagtttaagtattgaaggaaacgtttctggaaattgctgaacaggagatctttgttatctggcagaaaatagttctcataatctattagtggctatgtagaaagtataaaatatattgaataattctggaaacccagataaagagaatttaaatacagaattgtcacctgctatcctctttaagttgtagagcaaattgaagaagataatgggtaaactataatgaaagaatattgggaagtgttaaatactagaaggtcagtgcatattttgaatctgtctagtctcttcagaaggcagaagatgtttaaattatggaaggaaatatttgtgagtaaagatcaaatggagtttattgtaggagtaatatactccatgggtaaagactggagggtggctataaaaccttttattaactcctcagaaaggtcaaagtgcttttctatgagagccttccaggaagacaaaaacccttccaaagaaattaaatgtgtacctctcaggtcctctcaatcaaagaacagcaattccattgaacttaagtacttgggtaatctccgcagaggagacttttaaggaacaaatatttggttgtattttctatcgagtgttgtaaaagtgatttcgattgtaatcaaaattgtgcatgagttcagctgaaagtactgatatcttggagacaaccagataccatctccaagctgtctggaaactactaagttatcaacaatgtattatttttttcaaagaaaagaaaaggtcagaagccaggggagagaacatgcagttagatgcaggagagccattcagagaattcataatttccaggtcagattgtttttcagggagggaagtcaaggagctttatattctttctacagagttttgaagttgtttttagaattgttaattaccatggcttctctctgttatagatagatatcattgagcttgtcttggttaattttgaagtgaatgtcatatgatcccaaggtattttcaagcccctaaactcaatgtgcaaactttatattctgtgattctgcaggacttaatacaggctccattaagaagtgctggataccagttttattctagagtttcatgatcattcaaatattcccatttgatgattactgaatttagtcttttactaagatattaataatattttaccttaaaaggtagggaatcatgacatttatgggaaaattttgttaattttgctttaatcttgaaaaaatctcccttaaatatctttaatttataacattgtggtaattattgcttaataaatcttgcactgtttaaactgcatgagtaaaacccgttttctggcagaaaacttagcaattgcaatgcagtttaaaagtgcagtctattttcatttctggttttctaaggcctgtctgaaagatacaacactttctcattgtcttggcattgttttaaagacattgaagtctgaaatactattgcatgtggggcatgtataattatgttgtatgcttattggtttcaatgttttctgtgctaagagatggcaagacagcttagtgaataaaggaaactgcttcggaacctgatcactggaagttgatacttgggacacaaataatggaagaagagaatctatttccacgaatagtcctctgacttctacatatatatgttgtggctcccatgcccaaacataaacacacaatataaagaaaatacagagagagaggagagagctttgtacacataggccagaggaggggcatcagatcacctggaactagagttgcaggcaattgtgagctgccttagccatcaggagaatgcaaatcaaaacaacactgagataccatctttctcctgtcagaatggctaagatcaaaaacaccaatgataacttttgttggagaggatgtgggaaaagtggaacactcctccactgctggtggaagtgcaaacttgtatagccactttggaaaccagtatggctactcctcaggaaaatgggaatcagtctaccacaagatccagcaattccactcttaggcatgtaccccaaagaagcacactcatacaacaaggacatatgttcaaccatgttcatagcagcattatttgcagtagccagaacctggaagcaacctagatgcccctaaactgaagaatggatgcagaaaatgtgatatatttacccaatgaagtactactcagcaaaacaaaacaaaacaaaacaaaaagaaaaacaatgaaaatttgaaatttgcaggcaaatgaatggaactagaagaaaccattctgaggaagataaccaaatcacaaaaagacaaaattgtgtgtactcactcatatatggattttacaatagagcaaaggattagcagcctacaatccacaccactagagaatttaggcaacaaagaggatgctaagagagaaaaacatgaccccctgtagaaggggaaagggacaagagctcctgagtgaattggaaagatgggggaagaggaaaaggagctaggagaatgagaaggaagaacaggagtgctgagtactacataagggggcaggaagtttgtgtatggggaagaatagaggagagcaaaaataagagataccatcagagaggaaaccagtatagggttaatgagaaatcaagaactagggaaatgtccaaagatctacaaggatgacacaaactaaccatataagtaacagtggagaggctacctaaaatgccctcttctaatagtgagattgatgactaattcatatgccgtcatatagccttcatccagtcgctgatggaagtagaagcagatacccacagctaaacactgaactgaactggaatccagttgcagagaagaagaagtgatgagcaaaggggtcaagaccaggctggtgaaacccacagaaacagctgacctgaacagggggagctcttggcccccatactgatcactgggaaattagcatggaactgatccagactccatgaatatggaggtcagtgtagaggccttggaaatttatgcggcttcttgtagtagatcagtacttatccctagcataggaatggactttgggagcccctttcacatggagagatactctctctgcctagacacatttgggagggcctaggccctatttcaaagacattacagtctctgaagactcccccatggaagacctcactctccctggggagcagaattgttatgggataggtagggtgttattggggtcaggagaggaggtgagagagatggaattgtgattgacatgtaaaacaatcttgtttctaatataaataaaatatggagaaaaaactataaaaattgagtaaatcttcagagattcaatgttttgttcttactgcaataacacaatttagtcagaagtacacagtatgtttgaggtacaatgggaatatatcaagtctcatttatttttcttgaaaattcctgtatctaatgaaatatattttagtagaggaacaatataatcacccctgtgactctctttttaatttgagaaatcatatgatcttgtgtccaatcttcttgtttgaaaataatatttatggtttctgctttatttcatgtttaattttttttacgaatctatgttttctcttatcctatcttacatatttctttacattttaattaaacaaattttatggggaagaaaattaatggtatataatcctatcaagtgtagttcacattttttaattttcttcacatagacatgactaaaatatttgtaaggaatacttctatgtagaagaatgagagaacttttccaaggtgtatcccttagtcttcatatgaatgtcttcattttttctctaaataaaggcctcactttattttttagtttttgttttcctattatacccttcaatttctgtttcatggctatataaatacgattgtacttttaaaaatttctgactataagttatattttgatgagagatgatagcattatccatggaggatctttctcatactttatttttaaaccccataatgtgaatatgatgatcttgtatgaatttctcaaattatgaaaataaatttaagaaaattccagaccctcattttccttactatttgaattatacacaaatattttgattgctgctctatgttgtgcataatagtctccttcctcatggaaaaataaagacagacataccaagtacataaattaccttaaaaagaatcctgaaggaacaaacactgtcaaaaattattttgaagactgtttgatgcagcatgacggaagtagcagaatgcagcatttcctgaaaggagaaactatgtcctttaagttggaggcagaaggctgaagacatttagctcccttaaactgtgaagaacatcaaaggatgccaaaaacaagaacccaagggtattaatgagaccttccattaacccacaatgaatttctttgttattaggtattatgtgtaaagtgcatgtgttaagttttggagatgaaagcaagaactaaatgtgcacatcatcaaatccatgttctttccaagacacccacagagcacctgttgctcctaaatatgaatgccttacacttgagctcactaaaagatatataacagttacgctgctctctaaactcctgaatcactgttggctttgaaaacagctggagcattagttgatggatcctgttggctttcataaatccatttatgatgttatattttcacagagctttaggttttgcactgatgttgaaagttcaccaataaaacacaagctatatggttggtgtttcccatatgcagaataaattctgaaaagaaaaccaatattttatctatgaatctcaaataaccttttttggataacggtgtaagcacaggttctcaggcttgcttgcacatgataaaagtgattttatgaggctatagtttctgtgtttatattatgagactacatgtttaattttaaaaataaaaagaaatttaaatagcaaagctgttatttctaagtgttttgataccttctctcatctttccattcacaacctcaatatgtaattatattcacatattttacatttcctgtcatgttacctaataagcacacatgacaactcacataaattaaatatgtccacatttattcacctcatatcttttcaatctcaatatatagaaaaagacaatcctctacaattaccaaaaccacgtggaatgttgttgaaacacttgtgtagaaagccgcatggttttcttatttcgtaagtttttcaaacttgtaataaatgtgtactgtttaccacctaaataattttaccttgtgattgaaaataaatgacaaaatatgttggttaatgacagtgagacatggataccaatcagtttggatttctgtttttctttgagatagatgaaagaaactttagacacattcatcgtatgccctggtaaatattaacccactggtgttgtattgagcttctccctttaaaagattatttcaactttcaggttctcaaaatagcttctgtaaaaactgcatgttgagattatctttctttaaggagagatatgactttctattccaagagcaatatacaatggaggctcattctctttgttctaaagaggaaggagagaaggcagcatttgggcatgctgaaaatgagcatctcctctcctgtagccatatgctacaggcaagaatactgttccaggaaaatagaggaaaatgtaccattattctcttactgacactttcaattgccttaaactgaaatatataataaatgagcatgtaaattagccaggatctttgtctatggtgtgactttctgatttaacttcctaaatagggcaggaaaaacaatcagtgaagatcatatttgataccctgcccccccccccccccagctaattcccccgccagatgaaaactttaagtgctgtggaaatggtagaaagaaagttgtgaatggtggaaaagaaggtaaggagcctggaaaacagacatataaaagacagtattgtgggtttgttttcctgaagttattcaggtgatgacttctgataggaaagtagtatattatgtttcccagcagtgcttctgagtcacaagaatagaatacctttatctcagatgttattgttttcaaaatctattgtattaaattaggctcaagtcaccagtgaatcacacaccatagaaaatttactctaaatcagttttaattgtatacattcaacttctcagtgtgtttgttaaattaaattgtaaatctcatcatcttattgcactaggagatgtttaattttattatgctacctttgattaattaaatgtataaatgtaggcaggtttattgttaagcaaataaatataatcattttggatttattattatatgaaggaaatttctcctatagatttttattaacattgtaaaaactatagataatagccaacaaccagacattctaaaagacatcactagcatatgagcatgacagagnnnnnnnnnnnnnnnttccctagctacatatattttttaagatataaaaaatacccttcattctagaggtaagatttttaatctggaatatcaattaaagtcaagttaacaattacacatttagggaactggtctcaaagtcctagtgtgaacatggattccctggtgcttatcactaatattgaacagttgtgctcaaaagtgctgcctttctgtcttttcccttttctaccatgaacatacttggtataaataacccatctatgtatcagctttagaagggaacctctgaagtcttctaaagattatattactcagttcaattttacctgcaagacaaacacagagtttaatgtaaaagcaaccttcctatgcttgcctgaatttctgtggggcagatgtctgttctggaaggttctggaactgcacaaatgagacatagcataagaattatgcttcatttcagaaaacaaaactttctccacaatattcagtgtcacatattgagttttttcacccaattggtataaaccaagggatttgtttgaaaggatgtatgtcacattacaatttttcctttgagaaaatgcaatagtaaacatttgttagacaggctatttgccttttcatgtccattgagtttagtttgaaaagaacaccttgaatctatatttaagcagaattttaattagcaaataaaccttggcatatctttgtctgtgctgagtattctgagtcttttttctcaggtgatagtcagtattaattttatcattagcattcctatgttttacacattttgaagtcaaagacatgatattcttgttggcctttgccattttatattaattctctgttaccaatattgggagcttaggtagacattcagaagtgtacagcatcgactgtctaaccaaattccaaaataaactgtgttaaacagtgcagtttctaatagatcacagcatccttagctagtgtaccttttcaacaaggaaaaggttaagatacacagtcttgcctctgattaaattttaacagtaaattattaagacattgtcctcacaaatgttgccgtgttcagtacaacattaactgtccagttcaatagtagcaatgaggcaatgtttccagcactaaccaaatgcaaccatagtgaggtaagcactgatagtgtacctgaagactctacagagcagctggaccaaaaatgtcaaggtgcaaatgtaaagaagaacaggaccctgaggactggtacacaggaaaacaatacattagagatctgtaaaggcttaaaagacatgacatcagatgtttattggcctcaagagctatcacaattattgcatatggcaaagagtcccaacatctaagacctgactgagatctgtaatacaagaagctgctgcatattgctaactactattcactatggcttctacacaatgatgttagagcccaaagattataattgcgaagtaaattcagtagtaaattccagcatgatagtaatatggttatcaagagacacaaacctggttgctaatatctcctactatgtgacactctcaaaatattcttcttctcatgatgctggcaacaattgatttttgtacacaaaatcactgggataagaaaggtacctaaaccacagtacttttggatccactgaacctcattttgaaagaaattttgattccaagttttttatttgtacttagatttaatacagattataggtttatggactgtagttgtactgtatatacataaaagcttttctatttaatattttgatttaatttttggaagaatatggagagtgattttcaagagtttcttctttgcaacttgaattttggagactgaattaccatggtcaggttttagagggaagctctttcacctgttgagaaatctctccttgtctattgcagataaaggtttttttctaatttaattgatagtcaacattctcacttaatattttcaatttatcataatttaaggattgcacccatgaacaaacttcataaacgatttctgtagttacatcttgtgatgttgcttttaattagagtctgcattatcccaggagaatgaagcagatgagaatggttacaaagaactggagtatataaataactctggtgactggagtgtgcttgttagaggtcaaatgttcgtctcactattctgaatccaaggaggagaaatgacagcaatgtgattagtaagaaacttgataaaataacaagcctggattctttagaatgtaaaggttatggaagacaaagatagcctacaaagaaaatgtgtcagattgaggaatgctgaattgagatggcaacttgctgcaatgtgggattctaaaacagagtgcagacagtcagcatatagttgctgtattatattgttaaatagtaactttacaattttttgttttgttttgttttgttttgttttttgagacaggatttctctgtgtagctttggagcctaccctggcactcgctctggacaccaggctggccttgaactcacagagatccatctgcctctgcctcccaaatgctgggattaaaggcttgtgccaccaatgcctggctacaatttctaaatttacaaattgtaaatatattgtaatttcattcaacttcatcatgtaacatagattatataatggtacagtatccattgtgaacattgtatatttgtatatacattattcattaaaaatatgttaggttacataggttactgtacttgtaacaaaagaacatatctataatggattctcacaaaacaaatgtagcacagtagaaatgtagaaatgggcagagtgtaagccaataacagaaccaagaagcatctcatccatgactatgctgcttatggatttttttcaatattcccactctatttttagagccaatcaccacactgcaattaaagcatagaagactttgaaaccaacaatcattcatccatattgtcaacatctcaaacacttttatggggctccaactttgtccagctctgttcattaatggcagtaccacaatacaagacagattccaactttaaacacctttttgcaacttttgagctaatcttcactgaatcattagtaaatatcaattttgacacattctatcatggtaacatatgtggtctcactagggtcttaacactatgtggaaaccttattgtatttttcacatagtgtttgtgtgaactgacaagaatcatgtcagattgtgttcatattttgcgcataatgttctttgtcctctcccctttttcctatcaaatgtgacatggtatttccacatctatcaaacacactccacactcctcagtgggacaaccatgaattgaacaaacaaccagggcatttgaaccacacagtttttcatgattatatgagtgcatgtacctgccaaagtcagaaaagcaccttttaatttcgtgaattaccttgtcatgctagagttagaaaattatttgttctaataataaagatcataatagtgaaaaggaaaaaattttttacaagtgctcaggagcacctagtgttagttctgggaactgaatttgtgtcctctgcaagaacagaaagtgttcttaatcactgagatttctctccaacctcaaaagagtcaagttctgaaatacactaccacctgtttaaacatgaaagctgaagttaaagtgaaacagatgcaaaaggacagagcatgcttgctgtgcatagtaatcacctagaaggtatgaaatcacagacacagaaagtagaatagaggctacaagtgacttggaagagagagaacttacagatagtgtttaatgagtacaaagattctgtttgaaatgataaaaaatgtcatatattattactaagcattgttcatacagttaatgccactgaattaagccttcgaaatggttacaatggaaaatgtatgctatgttgattttaccaccaagaaagcaattcacatttactaatgcatgtgttctggggcatattaagcaaatgtttttaacttcaccactctgccctattaaggaaaaatgacagttcttatcttggagtgctttaggaggtaataaattaattgcataatccatctagtctgtcacacatggttgtatagaacatggcatccttgtaatgtaatatccacagcagtaaaaaaaaaaagtaagattcagtgagacaattggtcttcagacagtcatgttcctaccatagtattttcaatgtctattgtgcaacaggactagctccttcctccaatgcatttatttgaaagagaaaatgtgtttatgaaatttggaatgttataatcatttattagacattgatagtgaatttgtctcattaagatgtgaaatttcttgaatgaaatatattttctagctggcaagaagctagcatggttttgagggtttccccattgaagcctatttaggcttctttttttcttgaatactcacccaactgtaacttcccccaaggacttttacttcttattttggactgatatttaaattatttcagaatttttgtatttatcatgttgtgcctgtgttttaaaaaggagaaaggccttccccaatgtgtatcaacaccgttcctacagaattccttcataacattattcatctagaaacactgctaatttgaggacaatgcagatttcctttattacttttagattgctctaataatacttcttgaacatggaaatcttgaaataccacttctggagagagctcagcagttacttgagtgtatttgctactctttcagaggacctgagtttttagctcccagaacccatgtgtgggggcaaaattctctagaactcctgtagtggggatctgaggccctcttctgtcctccattggtactgcattcatttggaactcagatacagaataacaaacaaaagaaaaacaaataagcattgaaaaataaaaatatatatatatgactaaaattggaaggtggcatgatgggcaagtctcgtggtgtttattcttagagagtgaatagatcctgggagatcagagctgaaaaatgagatagaccaaagtctcatgcagcagccaactttattcagagcatcagacaatttatacaaagggttaagaagaatctgatgagtaaaatgtataaccacaaggaaaagccgcaggtggcaagaaaatgttttcctttccatgagggcatataaataaataataatagccagttgtaatgaataatgtagtatcctataatgaagcaaattataatattagaacagtgaaatccttgtctgtaatatgctgccatcaagaatagatattcaaacaatggccagtacaattagtaacattattacattgaccagaaaaatacagagaaatgtctaaacagagaacgatatgatgagtagttcctgtgtcctttagaatgtaagcccatatttgccctctaatagaaacacaaattttaaaatatcatatgcatagtggaagtgattcaaagcccaaggaaaattaaaaccctgtctcttctccagagagattaatgggtctaatattgtcccaaagtctagtcacaaacacggagttcttagtaaaatcacttcttccttggtgcacaggaccttagcctggttccagaagggaagacttgacttctgatgatatgggcatagtcactatgtcctttttccatttagttggaggtttgttatgtttctggtgacttccactgtctcctcaccctctaccatggtccttggcgcatttgggcttagggagccaaaggagaatctgtatgtttttcagtagatccatctgaaatgacagatgtataccccttcccaattttcttctggagaaataaacataggacaggtagtgtatcagctgcttattttcttctgcaacgaaaaccagggaggtttgagtgtgcattatgtatgagtctattgctggaaataagcctgcaacataagaaaaatctgaaataatattttaggtcttatgaattaactgaagtagatgaaacaaagtaggcagttctaccagttgggccgaggaaaagaaaatattagtaaattgatgaatatctggatcatgaatccctcctacagcctcaggtgaaacatcagtgaaacaagcatctgcctgtggaataggagatgttgggacaactttggtactcataatccaatccatatgagaaaaccccatatcttactagctagataataatttcttaaccttacatagtaatctgtgaataaaatttgaaaatccttagagttcaataatgttcttaaagactgttagtttagggtcttataatacagcaaggagctgatcaatataattgttgacatcaggtcctaattgaaaaagaagggtacgacaagcagttactatattattgcctttatggtgtaaataaatcattttcaatggtttatctttgtgtgctataatccctgtaggagacaattcattagggaaaaataagtcagtttaaaggaagtgaaggatgcccttgatacacaaatgcctcttgtagtctggattggaaaatgaatttctttttcctgccatgatctggctttcctacattgtaaagttgctttttcatagactttcctaggtcttcattaaaaagtgtagagaattcaaggttagattgcttatgaaattcctcacgccttcagggtcatcttcaggcaatgaaggatacatatctaaattgtcatagttggtggtgatgctgtttttactttcaattttgcctgaaagggaaaataaaaatcttgtgttttgcttcttttatcaattgtacagtttgattacccagtttgtattcattcaagatattaggtgtcccttcctcttgactatttcctatttatcttcctttagtatttttttagcagtccaaactaatgcccaagtgtcccaaataaaatatgtttatatgccatttcaataatcttttggactaccccatatttcttcatctaaaattccttcttctggaaatcaggaataataacaatgaacaacttgtaagcaatctaataattgtgattttcatacttgtagtcctccttccttataaaattatgcacgagcttgacattaagtcaaagccttctgtgctttctgtcccattattatcactaaacttctgtgagacttcccactttcttaccttatagccaacatcagctccctgattcatggtgccacttgtttacttctctagtggtggtgggaatagggagagcagaacctaaaaatgactcgattaaagtctcatgcaatagccaattttaatcagagcatcagacaatttatactctgaggattaagaagaatcacctgagtaaaatgtacaatcacaaggacaagtggcaggtgggaaaaacatgttttccatgaaggaatagcaacaaatatcaatagccaattgtaataaataatctgaagtaaacttacacttatctgggagcagcacaaaaacactttccaaaagcgatatcatgttttaaacaaactgaggctcacaagacttttgtcttattttattggagttttcttgaatttctcagaattctcctcacaaggctccattcttggagcatcttctgacaatgtggggagttggagagcaatgtagggtgcacaggaaaaaaaaacacattttctacatgaatataatttccaaagatgacattaaatatattctacaaataggaatggataaacagatcatatcttcttatcaaacacacacacacttgtaaattgaacagaaacctgtaacatattttatagattttactttataataattaccctatgctggttttcaatgatgacaaaagcaaacccatagagattctaggagagaaactgtaaatagctgggcaagatggaggacagtcaatctcagaagtctgcaagttaatttctgttaaagctaaaattgctctaggactaaaatatgacaaagtgtttattaaaccaaagaaaggaaaactgtgttatgtttctcagcctgttagatttccaaggaaggtcagtaagtgctttgtttgccacagaaataggagcactttaatgagtcagaacagacatcacctactaactctagtccagacaggttttgattacctaaaacttgtgaatctgtatgatgcattagttggattaactttttataataacatttcataaacttgtattaatgtataatatttatgtacttatagtcaagatttaatataagtgattggaacggacagggtgtttgcacaaattaaaataaaaatgccaagcaagtggtgttctaggtggcttcagtccctgtgtagactactgcaactataaagaagccaagaggaaggtttcagtttataccttatcaagaacatgtgtttaacaatgttttcctcatttgagaaagcatatttaaaagtacttatatccaaaaataataagtgaagtaagtgttatactattaagtaattcacaccatcattatcacatcagtgtgttgcatacctgtgggtatgtgtgtgcatccatgtatacacacacatgcatacaagcacacaaacacaaactctctctctctcagaccaagaatgcaaataacacttcaagcttctactcaggaatgttgagtatttacatagttaagagaaagaaatgagacacttccttttgacaaattgtcatgaaaattatcattcctacaatgtgaatttaggcttttagttggtaatatgaagatctctgtcacagctagctgtgacacagctttttatgcagcacatatgactcactgttccatgtatctccatatctagaagaatgttggtcagattttatagactaacaaaaagacaacaaactagcatcctacagaaaaacatcactgcatgcttttgagtaatctgtgaggccaaggatttgggatgacaggggcatgaaggcaagcactttggagggaaatgagcaatggaattctttattgagctgataatagcgagaagcgacaggtgctaccgtggttactctaatcattcatttcaagtataatttatctctgtattgagagagccgagtgagactatcagctgtcttcagttgattgaagtgtgctgtcaggtatcctggtttcctcctctatttctgatttggagtttagagggggaattgggtttctgtggctgaagaaagaacttaaaaacagtcatgatagccccaatgaggacttgtgtgatgaatttatgaatgattattaaggctatgagacatgtttgacaacactatcatctgcagttgctaacaccatatcaactccagtgtgacaaaacattattatcattgttttcctattgctgctgcaatttcaacaaacttcatagaaaatttgagagatggatatccacctatttctttaaatcaaaagcaataagataatttaaaaatattttaaatggttatgaaatattggaggcatttaacaattatccttggggtttaattaattctatatcaaagaaggactcaaggcatccctcttctaaactacataatgcagtcaggcatccagaaaaaaataattgggagaacacaggacaggattttatgttgtcacaaaaaaaatctgtcagtatattcatgtagaatgaagttaaatgtgattattacttattttaaatgtttttggtttaataactagatactcttttaatttaagaaggtctgattaagatcagctttacctctgatctccttgacaatgttaagcaattctggatgaataatatgatatagaaacgcaagtgaggttacctaaggttcccttgagggcacattttcattttcaacatcgctggatttgggatctccaggagacacatatctgctcatctttgagggagactacagagagatgtgaatgaggagatgacatgcacccttaatgagacatagcaccatcccattgggctgcaagatcctggacagaaggaaaaggagacaaggaggcagcctgttggggttcaggtctccctgctccttgttcatggctttagatgtgaggagtctcagcagcatgctcctaccactataaagaaagcgaagaccatctgtagtctgtaaggttaagatatctttattcagataaacaccagccaaacgcaagccagagcgtgcccagaggcagcaggctagcgaggccagagagaagaggctccccacgtgaatgtggctccttaagaatcccccccacacatcctcaacctcccctgaccacgctctgatgggcgtggccaggcacacctttagtggctcctaagaggcggggctagagtgtctccctacacaccaccatgagtctgccatcctttccaatcccagggcaccatatactcttcaaccatgagccagaatagacctgcttcccttaaattgcttttgttggatatttgcttacagcaagaagaataattaacatggagtctaaggtggtagggaaattactttatagtctgtaggccctgatcaattgtgctaagaccttctggttacatctcagtctattctcacagaatttggttatatcatacattggcagtcatggttaagtgtttgtagagtaagatgctacagttggtgtactttctatgtcagctagaatgtgggtagtaggtctctgtggaataattatgatggtaaagcttttttccctattaataaaacatgtgcccatccctttaacttgagtttacacagttcagttcctgtaactaagaaggaattgatccttaattatcagtttttgtttgtttgatttgttgcagtttctcaatatcttggtgctcaggattaaaagactctgagaattctcagcacatggcacattgatgaactgcacacccagctttcaagatctcattgcaatttgacagattattgttttgacagaagataaatgggcaaacattttcagtagttctgataaatgtattttgtgcttcaaaaggcatttaacctttctccccattgtcagattcatctcatctttgatgtctattaacatgggtggttctgataatcaccttaaaatgccacataatgatttattagcaacctgttttgtgctattacaatgaattttaaagtaacagaaaaatgccttcaaagagattttcatttatctaagggttgcttcccttttattactgattcatttttttttgtcctgagttgcagaatagctcagataaaaaatatttcattgtaaaactgctctctacatagtagatagggaagcttaggacttgtatattttggatagccatggatgtttaaatgattaatatacagtaatgtatattctttctttgaattttatcagaatatctgtgtattttctctagtgcttaagtaggtatgctaatacatttaatttttaaaaataataaaacacacaaatcaaaagctacaatgtaatgtgtggagataaacaatgggaaatatctaagaacactgacagctttagcacaaaatgtacattattttgactgatgactttaaggaatgttcaaaataattttcctagagagcagatagctatgtaatcagcaactaattaaaagtgtaaaatttaagtggtatactataaaatgacttgatagtcttatggaaaaatagatgcctaattaaacttaaaaatgataaaagtcacaataagcacttaaaaataaaacttgtcattcttctgaattggaagattgccttatatctgaagtcagcatgaactatatagtgaaaacctgtttcaaaaatataaataaaatggaaaatgtaagaatattaaaagataagctataacatcagcattttggcaagattgaaaagatagacagagattgatagaataggattcaactgataatttaaatattataatccagaacacagtgaattaagctgtgtaaaacacccaggactccattgctgagatatcagccaaattcctaggactataaagaaaaacacactatgtggcttttgcttcctgaataaaaaaagcaaaatattgaaatcaacgcttcgtattttaacgtgtgtgtgtgtgcgtgggggtgtatacttggtaggtacatggatgtcaagtatacatattgagttcagaggacaatacatgggtgtctggtctctttcctccttctctggagcagaacacagatcatcaggctagtatgtggaagtcttcctgccaagctatgttgccagtcccaagcatttatatattattccagaataattcatttattcattctctcttgcatgaagaaagttaataagaaattatctagaagaaaatctagttgttgttatgaggaaaacactgagcacagagaacattagactgcaatagcttgacataattcatcccatcagttagcaagtgtagattagcacttgtgttcattatctcttgtactggcttgctgatagggctgaaaccattatcacatccactccatggacaaagtcaatactatatcccatagacacatttgattgatgccagaagagatagctaagaacacttatttttattctggaagaatcagttatactcttagcacccatgatgggattatcctcaccaacggaatcagatgccctcttctcatgtctgcaggtaccttctgaaatttagtatatactcacacacagccactcatgtatacataaacttaatatatattaaatattcacaaattttggactcaagtctgatgtttttgaaatattcaaaccatttttgctactattgacattcttagttcatattctcctcatttataaaaaaagatctaatagtacttcctacaaaatgtttcattcacatttactgtcaaatgttatattttagaactaaaaatttttctttaaaaaaagtgaattctgacagcctaacaaagctgcatcatagtgtattcagaaagcagaccagtatataatcattacattcccccaagtgtataagtgtgattggtgagaaagtttatcttttatggagttaataaaaatttcagtaataaaaatgccaaacttacacagagccctatcaccaatgtaacaggaagagtggaagaaatcagagtgcaactgggagatggtatggaaacaaatcacgtccacccatggaaaaagactgatggtttacactaagtccacgggaggctagaggaaagcaaatgtggtttgaatactatacttttgatctcagacttccagagcttagaaaacaacggagccaatgaaagtaaatgtaaatgtatgtatgtatgtatgtatgtatgtatgtatgtatgtatgtatgttcccataaatgtgttaatagattgaattcttttagagaaagccaactaaataattaaattatccagtatggcttcatgtagtagttgaaaagcaaccagtgactcttaagcctgggagtgtaatcctcaacagagagactatgagatggaataatcagtttagtttcttgcattgaggaattaccaaatcatcatttgcaaagtagattcagtggggaaaatgtaatagctaaaccttactgggggaaaattgtaatctaactctatcaaaacctgtgatttaaacttagacatgtagattatagataaatctagaaatcttttaaaaaaacacatgttatactcctaaagtttttgtaataaaagcaaaattttaagactttcagaagaagacaatagttgggaggataaaatattgagcagatttcagcagttatagagaactagaaatcacaatgagtatcacattgcatacacaaggcaatattaattagtggttatttaaatatatgtgtataaacacacaacacacacacacacacacacacacacacacacacacacacacacacacacatatatatatatatatatccttagtttcatatatatatatgaaactaaggaagacatgttgggaggatgggctcgaacattgcgagaagaggctgaggatctatatcataaacatacattgaataaataaataaatactagctctgtcaaaaaataaacatacagtgtattcatacaggtctttcctaaaaattcaaataataaataaaaatatgaagaaactgaagttgttcttgagaacatatgaggaggatgaggtgtggcgaccagagaaggctttaagttgacagcacacagacttggaataagagctgcatccaagaagtgtgcagaaattaaaattaaacatagagaggcaggtggcattgtctgaaaattctaggctgaggaaacaacgagaccacacttggatcatgctgatctccaatttagttttgatcctgaacactttgatgcatcctctatgcctccccccacccaccgtagtcttttcctttagagaaaatgtttaacccctttccaaataccacttttctcaccctagctcccttcctttcctgataatttccttatgttactcttaaagctttctttctcagcatggtcttcaaagtatccctccctgcagatactgaagtttaaatatacaatgtgtatcccctcccccagcatgattattagtttaatctgacttgaaatctgtaagaccctgtcatataatttgccttcttgggatatacctcccctgtgacaaacttttctgccttaattaatttgtcctattttttaagtgtatacaaatgtaaaatctcccaaagcatctttagatctttataaccaacacaggagtctaatcatatagcaatcaactccacaagaagacgagtactgaatttattactgtagcactaataataaaaacccagagacagatattggggttcaagctgaagatcagaaatgcaaagcagccaaaccaccagatagctcttagttctctcaaggctggagcaatcctgtccttaatgtgttgggagacaaattgccaggttataaaaccatgctcctaccttatatacctctctagtgctaagattaaaggcatgagctctgtttctgttttagccggattcactctcatgtagcccctggtggccccgaattcacagatatccagctgcctctgtctcctgattcctgggattaaagttgtgtgccaccactgctggtctcaatggctgactagtgtatctggctttgcattctgattttcagtagctttactagatcataaacagtatatcaacatattactctctataaaagaaaagtctacattcaatattatttctttcaatatcattatccaagcaaaaattatgtcattctaagatgtcagatcagataagtaaacacaaaagaataaagtgttagtagatgaatcattctcaatgaagacattagaaactgatgcctctagatagccatattaaatgtgtgcaaatgagagggattgtaaaattaatgtaaaacatggagtgttttaataaatcctagtgatttattaaattcactcatgcaaatttgtgatttcatggaaagaatgaaatttagttttcaactgaagtgtagtatcttatgtgacattaaaagaaaacttaatagaatggattttactatctgtggaatatacagagagtattaatgaaattcatacaaacatatgtgtgtctctctgtgtgtctgtctctgtgtttgtatgtgtctgtatgtgtgtatatgagtgtatctatgtgtctgtatgtgtgtatgtgtaagtgtgtctgtgtgtaaactcacaaaataaaggacagacgattatgattaaataacaagatgtataagaaaccaatgaagggactggagagatggctcagcaaataagaggactggctgtttttgcagagtttgatttgattcccagcacaaacatggcagctcacagctgcctaactctggttctaggggatgtgatactttctttccaccttcataaggaaccccacaaacagatggtgaacagactcacaagcaggaaaaacatccataaaataaaaataaagattaaaaaacagaaatgtgacagactatcaaaaggtttaacaaccacattttttctcccacaagaaaaatagtcaaaacctatctgaaaatggtatttgcagaagcactattttatggactttaaaagaagtttcgtaaggtccatgtcagttcaatgtgtgatatgtgattgtattgtcatctctaatctcatttctagggatcataatgagtgaggagttgtggtttgagtggacatgaaccacacaggctgctgaagatatctgggagtttgtggagtatttattcagtgtagtatttgctgaagaagtgggtcacttgggattgccttaaggtagtgagcccagacagactccctggtctcttttagcttctggcttgtacatagaatatgacctacaggccttccaatccttccacaatgtcttctctgccatgatggaaaccatcttccaaatgaaagccatagtcattcttcctttctgaatctgctgcctgtctgtcattatgtccagaaaggagaaaagtaactggtgtatattttagttaaggatgcccattttttctatatttgtacttgcataggcaataacagtctgaaaatatggacaattcaagaaatacattgtaagttttaagctgtgaactattcaaattctgtacagatgtcccctcattctatcctacctaaattgtgaattgatctttgtccagtgtattggctgtgtatatgccagccgccaatcagttacttggggatcattcccagtattaggtgtactattcaagagcacacactgtgctacagaatcccttgctgtgttcaacacttgtcctgaagaacaagagtgatggcagtgatattttgctgtcaccattgctccaacttattgtgtatttcttactgtctagttcataattcctatgttatcacagatatatattactatatatatgttaccatatgtatttatgcaggaaaaaatcaatatacaggaagctttgtactgcccatgtgtggttagtgtcaacattgtgtctgaagatgtaagaagtactcctgtaaatgcaagagcatgctgctttgtcttatccatttttatttgcaataaatttcaccatagtcagaattattctgcagattttggctattcatcattaatgtctagcagaaagcacttaatagagtttttaaaaaattaatgaataagcattatgtttcattatgtggtttcttacttcctttcttagaatatattgtccttaatggtcaaggcaatttgtcttactagttataaaatttctcctctttagttgagtaccttaagcatccagtatctatatatccattcttcaaaaattactttgttttgatagaatgtcaattatttcttgccctttgaactagtctattttgtatccttaaaagtaattcattgtttttcccatttgtctaaatggtgttgtttgggaaaatgcatctcttagctgcttctctagagcctaaaatattaacttgagcacaatagatctcaaccatttcctcttaatgaagtaaagactcccagaaaggaaaatgaagagaaaagtattataagaatgaaatatttccagattagtattcaagggtttaggatttttccctatggattttacaatttcaacaattttccaaaattacctttaaatctaaataaattaaatcacttctgctctaaaggagggctccaaacaaagactctccactttctgtcttgaaattatgtcctagagtgtggattctgtcatatacctgggacatgatattacttctcttttcataagccttgtgcaattcttcaaatgctcacttttattttgaatactgtaaatctagcctggagcgcattccaaggttttaaaggaaatgcttaccaggaaatttgattttgtgttcccttcctccatggaaaaaaatctattcattttccatacacactcctcagtgtcttcagttgaaatatttaaattagtataatttctaatgctgaacctatgtgtttattacttacttacttatttacttaatattttccctaactatgatctttcaatcaaaaagtttgcccttgtcagagataacaattctattttaaacaactggctctggaaatcactgtacacatccaagatttaggatatggtatcctaatgttcaaataactaggattagattaactctaatgtgcttggaaatgtctactaacagggcttaataacaccttgtcagcaaacaaagctgactttgcagatgacactgcctccccatgtcccatctggatctccatctatctcttctcatacctttgcattattttattttaataaggatacctttgcattattttaataagtgaatatccagggattaattagtgggctctgggaagcaaataaagtatcccgtttctcctaaatatatacataaaacaataaaggctttgggattctacacatgatctttctaacatattaagtagaaatagaagccacttataatttctcactgatatcaattttgccaaaatgtttagaaaatatatgaataaatctaacttaattggcagaacaagaaaactatactccattttaaaagattcatttcatttttatttgtatgtgtgtgtttccatgtaaatatgaggattgtgtatataggcccttggtgtcctgaaactgccttccaggactggagtatagattagtctagatatccccatataagtgtgggagatgatagtatattgtgtgcttctggattctgtcaagttgccaatcaatattcattactacactataattttctgtccaaagcagttgaggaagaatgcctcagctatgtctgtgcctgaggataccaacttttgaaatgttcagtgctagctagtggctgtggtatgaactcctttaggatgtggcaattttctcagttgcaggctttcttagttcagtgactgttagtggtggtgttgagctggtgattcagatgagctgtttacctcatctatatatacctatgcaatgagcatagcaaaagatgcctttcagatatataaaaacagcttactcaggatccacactatactcatgattgcaaataataacaagaactcagtaacatcattcagtcaagattaccagacataggtctacaatgccctgatgcccagtagacagtatataagcagacagcaaaacaatgctctgctctgcacaacttgtcactgggaaacaagcatgatccagaccccgtgaatgtgggtgtcagtgaggaggccttggaaatctatggggcctcttgtagtagatcagtacttagccccagcataggaatggaatttgggaccccatttcacatagagggacactccctcagcctagacacagggggagggcttagaccctatcccaaagatacaacagactctgaagatccccatggaagacctcactctacctggcgagcagaaatggtatgggataggtaggttatttgtgggggtaggggtataggggatgaagagagaactgggattgacatgtaaaacaatcttgtttctaatttaaataaaaaatatataaaaaggaaaaaagtgagtatgcttcttgtctccacttataagtcctcatgtagcatcgcagatcatgcctaaaatgattggttctccaacagctattggatgaatgaattccccccaaaattaccctgttttctaaataagagggttctaaagttaatacaaaactattcacaataaggaaattagcaaataagtattatttcaatagttgtcctagtccctaaagtgtcttagctaagttatgagaggaaagtagctgtgactatatagtctttaaccccatcaaagaccagaaggaaaaatgatattgcctgagtaactaggaagtacaagcaagtgacttccaaacatatcacatggatagtcatgtgtgaagttaattatggatcatatttcctgaggtggaacagctgtgacatttctcctagagttgcatgaggaactgaacagccaagagaatagtaataaggacagatcttaaatttgaaaaactgttgaatcaggcctactctgccaacaaaataaattagtacttaaaataatgagaagtcaaattcctctattatttggcaatctaattgacaaaatgaagagtttaagaggagttaagaaaatgaatgtaaattacaagaactatcccaggggtagatgggacaaaacattttgcttattacaacaaaagttacctaggctcaagaaggaacctaaggttgatattccattgtttcattttttaaccccagtggttgttgagctcttgtcagataatgctgatccctcagaggtactggtgttctaatgaaaattgactcagataatgtgaaaggcaaacacctaaatggtagcttggcagaatgatggagaaaaaactctttcagagaggacttggaggcacctgataatggcccagtcatatgcctcaatgaaaaaaggatatatctatcagtaactgccagtaaggttaagtcattcaacaagtaatactcatgtgaccaccgaggtagcatccagaccaaatataaggacagagcttcagcagatagataagattttgctcaaagaggagataaagatgcatcctctgaagcctgcttgtagcaaaaggcagctgatacagtaatgctaatctcagtgaaaatgaagagaatctaaaagatccccatacatttgaagatctggaatgaattttagatatagtcagaggagaaacctacccaccattaattggattgggcaatggctgcaatgaatcagtctttacctatactttatctaaatcaatttgtggtggaaagacaatggaaaaatatgaaagaaccaattgaactgactagaaactgggtataatttacttaatttgccataacagcccaacaccacaggtgtcacctcttctccctgatatgagaaaaattctcattgacattaactctggccaattgccaaactgttggagaagatgttaacttcttcaagcagactaggaaactagagacagataggataatatttttccagtctaatgtacagaatctaaccaaagcagcaccatggaaaatgtcacctaaactgtggccatttaggaagaggttgtgcagcactacaacccagacacaattccacactctgcagaaaacccaggacataaaaccattgggaagataaggtcatatactaataagacaccagtaaggtggacccagaaacattccttggcagattggacaaccctggaatcaaggaaagactccaggtccttctagcaaccatcagcaaagatcagggtccaacaaataaattgtctgataagtatacagagagtgatttgacaatttacaacatttacccagtctgacaaaccccccaaaagtatgtaattatggaagaagtagcaggaaaactttttaaagtagtactataaaatacatgattattagtccatagcttatctctaaatattcccacattatttatactagcacctaattgtgtcctggggatggatattccacccaaattacttctctaatggaattacattaaaaaccttaaactcttgggctgtagcattacccaagcccaaattcttcctatagagttccctaaaattaagggatcatttacaaagcaataccctattatgaaaggtgatgaaccaatcaatgacacataaataaattattgaaggaagatattactgaaccaataaaaaccttcaacttcagtagttttgtttggtcagtaaagaagccaaacagtcaaaggagattcacaatagattataggaactttaatcatttttctcccccaaataccaggaaatttacctaatgtagaagatacatttttaaagattacaaatggtaacacaaaattctttggcaccatatacttatcagacatgttctttagcatactacttcatgtggatctagagacattactatttttacctggaataataaacaatatatattcaaaagagtgcttcaagactataagaatagcccaataattggtcatgtgacactaaggtggtcactggaaagactacttaaattatattgcttacttttaagctatgtagatgatattttgattatataattcaataaggatggtgtttaaaactatatggagacagtaattgataccctggtacatggtggctggaccattaataaacacaagaagagaggtccagatacctaaacaaaaattttaggtgtgttacagatatctgaaggaatcaaggtccccaatagtgtattgcatgagattttaaatgtctagcctttcagggacgaaactcagatgtaactcccaattggtaggtttgcatatttaaagagttacataccatacttatatattattatgaaacccctttgtgtggttactagaaaggcagctgatttccagtgcagacaggaatgaagaaaagcttttgagatacactggaagctcatctctgagtatgccaccatgaacaatattaaatcaaatgctaccctaattatgaataccatattcattattgaactggggattcttcataaagcagaaggaagtcaaccaacaacttcctgttgacttctattgaaattacttcccttatgtggacaataaatactctctctttgagataaaatctggaccacagacccctacacccagtcagctccttatggtcataaagatacccattccaatgatggattggatctgctagaaggcagtgtcattcatagagttagtcacaaaatgaaagaaattaaagtggaaattgtatctatctggattccttcatgattagaatgtggtagaaacggtgtctgtgtcttatcatattgaagaaatagctcagttacctataatccccacccctaagccactatcccctctcaaaaagaggcacctattggactgtaggggccaatagaatggtcacagatttttgcctacatatagtttactattggttcatcaaccactgttggaacctaaactaaatagaaagtggcagcctacaaatcataggatgaaatgtctattgctgaggaaggaaccaccaaatcagcatgacatgctgtaataataacaacactattggctaaaatacaaagagctaaggaagacaaaaggaaaatctgcatcttctctaattcatggtacctgcaaaattgtatagctatttggtaattaaaatggaaaaccaactggcaggtaaatgacaaagatatttggtcaaggaaggcatggatagaagtgtagcaaagaaatcaaaattgatgtagctgatgtagacacccacagaagcaagacaaacaagacatccaaacataatgaaatagcagacaaattgctctattcaattaaggctagaatattaaatttttctagggagcaaattaggaacaaatcagcaagaatggtagatcacatagtttgtaaacttgaaagattaccccaacactaaaaaaaagagtagaaatggagtactaaattaaaccaggactatcctatgaaaatgactattaaaagtaacccagacaggaagactaagaaacctgagagctgggcattggtggtgcatgcctttaatcccaccactcaggaggcagaggcaggcagatctctgtgtgtttgaggccagcctggtctccagagagagtgccaggataggctccaaagctacacagagaaaccctgtatcgaaaaaaacaaacaaacaaacaaaaaaacctgagagtgttagcacaactattaagcaataaatctcaggattacaaaaaacattggtgcttataggcatacatactttgttcctgtagtttgagaaaaggaaccttcaggtttaatgacaggtctataaacaggccactggagactgccacctttatccagtacttaaaactacattcagacatcaagtgccagctataacatagtctcctaagcagtgtaattataacctacacatagatttcattggtcccttgaatactcacaggatcctatattcctgtactcttgtagatgtaagtgagggcttgtgttagccatagaaagtcatagaccacaacaattggcaaaatacacacatcctgatgttggatagtcagatgtggcagcccaataataactgagtcagatcaaggaacacacttcacattatctaaagttcaaaggtggttcctttgtatagaatacaatgggacttcaatccagcatataacccaactgcagttgacaatatagaaagatgagatgtactgtgtaaaaccaattcattacaactctaagacaccacttaaataaaggttatggaattacattctatctgtaaaatattagaccaagatcaagtagaatttctccctcagaagaagctattaaatcagactttaagctaaagcaaccaccagatatttctagaccatgcagaataattccccatgaatgtatttatagggacaggaaacatgagacaaagaatacaggaacgtgacacctagatctggcaatataatcttggaccacaaatgagaagggaaatatgaaccttagaaaattagataatctacaagcataatgtgcttaggataccttacaatacattcagttttcactttcatgacgatagtaatagttttaggattaattatgatattggtgatttaccctatcatactttggatggattttaaccagaatacttctatcatgaacacttcttgctaagcctcatctatgttatagctattgtgttgaacagaggaaggctaatgccaattttgtaccaattttgagagacatagtcactattctccaacagcaagctaaaacatccaaatttaaagaaagagaccaattgaaatgccatttaacacaaatttggatcaatatcacagaagcagcatacatctacaatttccactggagaacaatatgttctgaaatcatccttccaccttataatgaacaacagggagaataagatttgaaataaaagacatggaagactccactttcactgtaattagcagcaaaaacaaatttcctctcagaagtctttccctctacatatggcagatgaaccctgtgtttggctaacaggattgaaaatgaaaatatataattatccagattgggaccagaatgaggagacaggttacttgacttacaagacatcaacacccaccacaacaaaccatgtcaacccctggtattggagaactgtaaatttgacccagacatggataagtgaacaccatgaaagcattttctctattggaacacagtggcaccaccatatggatcaaatgcccagttcactttctaaactatattcagtattgtgcgtgaccaaatttcccaacctaccctaatatgaaaagatggacatataaaataaccacttaatatggaaggcagaaaatttgcacttactattgactggcttgaaaaagcattcaggataaaaattatacatttccattcgttttgactaacctcccgccacaacccttcacatcttatgaaactgaagctccatcaactgagaagagccatgtatatacctaaatactctgtgtgtacatggtgttataaagacttcaggttatacaatagcatagtcaataatattttatatagccacatcctataccccactaaagttttgatgcaacaggcctcaaccactgagatagaatctctgggatccaaattgaactaatgtactgactattgttaccttttgcatgttgaacaacccttcaacacaatcacccaattgacactgtacatgtgaaggcaaaactattcaaattgagttgtagtccattaagggctctaactttcactggaccaccacaatacaaggcttaatataccactaacaaatccacatgtctaaattttggaaaaaaattcagagtaacctaattgatctatcagtcttttttcatataccactccagaagatttacaactttataatacattacagacccattttaaggagaattatgaaatcaaaggaactatggagtccactaattagcagtaatacactagaacctatctttataacaaaaatatgcttgacaaattagaaagaatttttggagctgtgataccatgcccacactctatgacagtgaaatgttagacttcccaattcctctgcatatacatgccagggactctacatacttttttttttcctgcacagaatatggaacattgattcccagtctgatgaattcccatccttgattatatcatcttccaaaatgtttgcatcagtccaagaatagatatgatattaattttaatcagaggatgccctagagcctatgactccttactgctaaggtataacattttaataaatgaccacagaaacttacattggtcaaaaactgcaggtttggacctttctaaactggagcctgtggaaacataccatggctttccaattatttctaaatgattcttcaaccaccacacctcaaggaatgaggcactggagacttgctgacccataagaccatactcaatatatcacatgcagggactctgaatagaggactcctatttgatgaggcatatatgttccccataatgtagaaatcctgtggaatcaaagaatgcagcacaacctcatgcatcattgatagagaagaatgggaagagaaaaaatgctataaagagcatttgtcaacctccacactgtacttccccagcaatgattaccagagagaccatggtgatacctgaaaacttatagttactcctaggatccagaagatctcatttacttttaacctaaaatcatggctcctccctgaagaactctgctatgagccagaatttagaataccagtcttgtcctacttttaggataatagtttgctgcataaaagatgtatacaattgatgactgctggagctattttggttgcctctttactctgaactgtcattctgttcattcagacatcaatgaaaatataacagacatcagaaatgttactaaacatcaagcattttctattaatgtgttgtctgatggattagttactcttcacaaacagattacaccccttcacatgaactaaatgtattaaagcaatcattggcagacatgacaaatatatagctgaaaacttgcagagactggatatagccaataagatctgtcaaaattatctgccataacttattccaaggaacagcaaagagaagaatgtaaccaaagaagacttgcttttcaatgagtggaggcatacctgcctcagcacttttctacaggattttgaacagaaaatgagttctataagactcaactggaaacaaggaaaacctcttggtgtgagcgtggattctataaagtaagttttcttttattctataatgacaatgcaatgcaagattataacacatacctcacttggggatggatttatattacccaccgaatctttcctatatactagttggactaatacagaagatgtctacaacctacagcatcataccatctcacttcaggtcaatacctttgtggcaatccatactctgtcaaatgaactccaaatgtcagaactaacactttcatttgttgcaaactaactcagagaccttgacaatggagtcttttctacacactctaggtaggccttcaacctcagagttgatatctataacattatcatggatagcttggactctactttttattctgcaaaatctgattgaatggctatataaaatgctactaaagttacagttcacttctaggaacaggtaaatatatgcaaaatctctaccctaactttttaacagaggtgtgtttttgactcaggttcccaacataataatgagcataaagatgacttgctaggaaagccattttgacatttccagtgttctctcctttaacaaaccacaattacagtcagtggattgtgtgattcctagggatattaagatccggggaggacagataaacagagttcaacatttatcagcagcactcaaagcagatactactgcctatatccataaagttaccaaccttaaaaaaatgctctttatcactgctttcaaagtgtctcataagtttgggtatgttgtgtctacattctcattgaattctaggaaatctttaatttctttttttatttcttccttgacccaagaattgtgcaattgggtgttacttaatttccatgagtttgtaggttttctgccatttttgttgttgttgaattcttactttaaagcatggtggtctgataagatacagggggttattttaattttttgtacctgttaaggtttgctatgttgccgagtatgtggtcgattttagagaaggttccatgtggtgctgagaagcaggtatattcttttgtgtttggatggaatattctatagatgtctgttaagcccaattaggccataacttctattagttcctttgtttctttgttaagtttctgtctggtgttcctgtccactgtgagagtggggtgttgaagtctcccactataagtgtgtgcggttttatgtgtgatttgagttttagtaatgtttcttttatgaacatggatgcctttgtatttggggcatagatgttcagaagtgagacttcatcttgatgaatttctcctgtgatgagtaggaagtgacctccttcatctcttcgattgattttagtttaaagttcaatttgttggatattaggattgctaccccacccctttcttggatccatttgatgggtcaatcttttcccaacctttaattcttaggcaccatctgtcttggaagttgaggagtgtttttttgtatgaagggtaggatggaatctgtcttcttatccattctgctaacctgtgtcttttcatgggcaagttaagaccattaatattgagggatattaatgaccattgattgtccattcttgtttgttttggatttggtggtggtggtgaaattatgtgtggatttccaacccttttatcttttggttcttggtaaagtgtgattatcaattgcctatatttttctggttgtatttaacttccttgggttgcagttttccttccagaactttctgtaggactggatttgtggatatgtattgtttgaatcctgttttgtcatggaatatcttgttttctccatctatattgattgaaagcattgctgggtattgtagtctgggctggcatccatggtctttgtttctaatgacacctgaggaacctggatttctgggttaacagcctgtaaccagtcatttcccagtgaaacatatcacatggttaatcatgtgtgatgaggataatcatgtataatcaatacttccatagttccttgtattatttcagcaaacccataagaataaaaacactggagataccttcatatccttacaatgccatacataatgcttgttgtattccttttaaaaatattttaattgtttattgttttgtttatttttttctttaaggcaaggccttgttgctgtcattaaattctcatatttctacctcaaaatacagtcctttaagggctaagacattgaacccttctagtttattttcctaatgctttctgagttattggccacatataagcacattttctattttatgaaatatttcagtttccttagtaaaaattcttctgctgtgcagatttccggattatggttccttcaaggaaattgggactaccacgctcttggagaggataatattacatattaatattatggtaaatggaaatattaatataacatggaatggggcactgctttaataagtgctagcactacactccctattgtccatgtagaacttgttggttacattataaagaccacatcttcttgctggttggtgcagctatgggttgtctagtcattgtcccccatgtgcttctacaggtttctctgctccaaaaaaaaaaaagctaatgaacacattcctgccctgaaagtaattttttttcatttttaatctaattatttctaaattaggttgaaatttgttatagcttgctagcagatgttgacagatctagctttataatttgactttttgatcagcacaaaatatttactagttaataaatgttataaaaagccttactttattgtaaagggttttacatcagttgatgcaaatatctggtgtttggtgcaattttttgtgtgttgcaaaaaatttcttttaaacaaatacaaactcaactggctaagttcattattttaaataatatcatggtaagtctgataaaccataattagaggcattattaaacaatttacattgggtctgcctctcctctttaaaattaagactacaaactagtaggtttcattttcaaatgagcacacatacatgccatgagcttctctcatattagtgcctcctctttcatctccctctcactttctctcactgaccacggaaaacaggagggactatttaggggaaagaaagaatggtaacaatatgtcttttttgtaatactatttggcattttctagatgctcacaatgctctctgttttgctggtattgtcagcatatacagattttgttctacaattgccatttttttctggagaggaatataagtccttccctactaagagaccttcatcctctgcccagcttcatcctttgcccagctcatgctcattatgttagtgaacaacttgagaaaaaaaaaaaacaaaaacttcatgactgagcaatagctttgccccatgccatgttctggggcagacaggactcattccaatgcagctgggatttctagcctgaggcccgtgagaggactccaggctccaggtaccaggcatttaggcctaactgtatggtaagcaagtatggcgtggggaggttaaatagagagagaggggaagaggttcatgggctaagaagagttgtggacctgaaaaggtgaaggtgatgaggaatgggcagacatgaaaagctacttgccacccaaattcaaggtgatgtctgggtctgaactagcaaagagccaaatcttggaccagaacccgaaagcagctgaggggtcttgagaagaggtctatagctcctattgctaccaagggctatgcaggggcctatagtatgagctgctatatgtggtcatgttggtgtccaaggaccatgctgctctgaaggccatgccaatcagagtggtttgtgtgctctcacctatggcatgggtacatctggacatgtgctgagagtcatgtctgggtccatggccctactgcagctaggatctgcattgatgtctatttctccttgtatcactgagggccaagccaatgatgggtggtctgtgggattcactgcagtgggggccatgccaaacctgtttgggctgcatctagtgccatggtttcatccatgcctgaactgcttgcttagaccctgtctggatctgcggttctttcacagcctgggcctatattaatgtctgtgttcaatgttgccaccaaaggccacagggatgacagagatgcagtccataatcagtggcatgtgggtgtccaatggctatgcagccatcagggcaaagttgctctgaatggccttatgctatcacttgggaccgcagtgtcatctgcaactggactgctactgatgaccatgtctgggtccaagaccctactgcagccagagtcaaattgatatttgtgtctcttggtgccaccaagggctgtgcagatgccttggtcagccacctgagaccaagctggtgtatgaagaccatttcactgcaggggccatacttaactgggagggagggatgaggaggggtgacaatgggggaaagctcacaggttgactagtccagctgacatccaagcccaggactggggctgtgagttagtctaccccaacatgcatctcatctatgaattgttggagcataaaaggaggacaaacctgcggatccaaggcatcatgatctccaggacacaggacaacagcaggatgtccagataagacccaatgatagtccattgtctatgttatgacaaagtacagaggcctcagaccagaggaatgactcaggcaatgatgcttgcaagtgaagatgaaagggtaaaatgtgtatgtgactcacctggtcatcacctcagcctctcagcttcaaaaggcttcttcttcttcttcttcttcttcttcttcttcttcttcttcttcttcttcttcttcttcttcttcttcttcctcctctcttcttcatctcctactcatttgcctcctcttttttctgcttctttttcttttcctcctcctcttcttcttttctttctggttctgctttgttttgctgtgtttcttgttaggttttggtttcactttcaaattttgttttgttttgagtggtaaggttgcaatgtcaaatggagtgtggatgggtaatgggctgaatcagaatgaatgatatgaaaaccacagagaatcaataaaagttaataaaattaaaacaatgtgaaaaacttaaaaatatacctcatgatcaatatatttcagaataagattttggcataaagtatccttccttcatacatgaaataatttgtagttatttgttatctaatgtccattttattatgtagcacccctgaagatcaggtttatctgagaatagatttgcactatgctgaaattctgtctggtggaagctgtataatgaaaatgttatcaagaaaccattctttgcatgcagaggtcatgagggagcagaaaggttgagtcaggtgaagaatagaagaaagggtatgtgataggtagggttttagttttgggggcagggaaggacaggagggagaagggaacccagattgtcatgtaaatcaatcttgtttctttttcaaattttaaaaaaaaagataaaaaaaagaaaccaatctttcttccannnnnnnnnnnnnnnnnnnntctttctgggatttctgaggagagtggtgtatgaatctgtcattgaccttgggatctaaagtagactaatgaaatattggatgctctctgtgatcagccttcaataacttatgggggatgtccttctgtgtcatgaatactttgtcttattggttgatgaataaagctgttttggccaatgaacagaaagtatgtagccacacagaaagtacatatgtggggctaccagactaggagaatgctaggaagaggaacacagagagtgagttgccagaaaaattccttgtagctggtgagagacaagaggcttggaattgctggtaaaccaagaccatatggagatacccaggttaataaaaatgtgttaataattcaaatagagctagccaataagaaacctgaggcataggcctaacagtttataattagtaaaagccccatgtgtgtttatttggtactaaatagccaagggaccaggcaggacaaaaacctcatacaacaaataactgtgtcagtgatacaattgtgataaacatgagcctaaaacactactcaaaatcatataaatctttacccatgaaggcactaactgcacatacaggaaggtaccttgagacctaacacatatttcaatgtgtcttcaaaatgtatgtccttttgtttcaactataaatgtatgacacatgctgagcatcctcagaagtattctttgggacctttaaataggtgttctatggctgtgagataaatctggccaaaaaatgtgtttgtcgtcatttattgtcacattgttgctctactgagtatgctcacaaatgtgcccaaccttcaagtgctttcccacatgaaatgtggcatctagatttgtttccccagcccacttttacaagaaacatggcactggaaattgtgccttcactgtcattatcagctataaggaactgatctttctatactctctttagcttttgtcaatgttttcttctaaacaaggtatgaacctatgggttctggttacaaacagagacttgagaatttgttatgagctgagtgttctgttttcatcataagcttacccacttctttgagcttttaaaaaggatggactagcttcttatatatagctataatttattaaaacaaaagattctcctctatcattttatccttacacattttctttcaattgaaaaatgtagtattgtacatctttctttttggttattatcaacattactaattgtagagctaagaaacttcttcttaggtcagaactcaaagctcccatttatcaatttttttaactaaacctgacccttatcatcctctttcttgccagtacctccaatatcattctttcagcagggcttgtagttgctgttgatttgggttgaacttacagcaaaaaaaaaaaaatagtctttttagatcaataaatctgctctaacaaattcagctaatcatttttctttactttaaaacttttaccatgatgcaagtactgagtaatttattaaccaatattttaattttnnnnnnnnnnnnnnnnnnnnnnnnnnnnnnnnnnnnnnnnnnnnnntatgaagatatttttatcataatttctgtattttgtagtatatttgagtcatatgtacacatatatacacaggtatatattttcacacacctgagagagaaactgctaattgagcataattcttgcttaatataaataaaatttttcattcataatatttgaaatatcgttcttagaaaaacagactatgatttcttaaattctaagaacaactaaaatccctttgactttttaaaggagtcttccaacatgggttgacaccacactgtgttagcaaagtgtatctacagtcttcattacgttacttctttggagaattttgaaaggacaaaaacatcacagtgtgccatgtagaatttgggacagagtataaacatatatttctgtcactattactgcctgcatgaagcagtgcatttttgcacactaatagcaaagagatggatgtcaatgaggaggcctctgcattgtaggggacccctggtagtggattagtaattttgctcggtgtaagaagagacttggaaaacccatctcacctgaagggttgcattcttggcctagacacatgggggatggcctaggcccagcccaggatgatgtggtggactttggagagtccccatggagggcactaccctgcctggggagtggaaggtggatggggtgggggtaggttgggggttcaggagatgggtgggggaaggggaggagagacagacgggactgacatgtgaaacaagcttgttccttatttgatctaaaaaaaagaaaataaaaaaaatttttttacaatagctttagatgcttgtgtgacataaaatattccagtcttcttttctctttctcatactgtgttgcatatggaaccctagttagataataccataatgagaaaataacaaaaaaaaaaaggacaggtaaaataaaaagagggtagtggagaagaataaaaaaacaattatatttatctactactaaaatatacagatgcattgaaatctttgcactaatgtcttaatcatcacaattgtccagatgcatttcatacatagtatgattatgttggagaggcctaatgacttttccagtatcaaagaccagaggcagagtgagtcacagaattcactttgtacctttgttccttcttgtataatcatgacactttctatatccagtctcagtataactgtataacgaggatactacttcaacataacttgggatgcatgaatataaaagttgaccacacctattttttctcatttcactgttttcaaattctaaacttcaatagatgaaatgtgttttcttaatcaagaattttcagaattctatgaaaaaatgaccatgaaaacagccagtggttactataaagttgtaaagctgaaaatatcatattctgacaaagactattctttattttagagcaattttgatccactctctgagatattacaattccctttcttatgtataatactttaaaatttcttttaaatgcaaaattgaatactatgatccccttaatgtaaaattataattacataataaactttaacaatctacatgtagctaatctgcattattgttattatagaacctcagatttgttctgtatatggcctcttatacagtgaaaacttaaggtaattcattaattctcacaatttggaggtaacttgatttgttttataatgtattcttaattaatgtgttttaatgaaaaagcctatgtttgaaggtattgcctaacacaacatcttctgtgtattgttgtcagttctgtgtttatttcctatgcctttgtattaatgatatctgcatgatgcctacaattaccaccaatgtactctcacattgccatttaaatgtttcatgtattatactcccaccattccctcataaacacatgttgtaacagatgggccaggcttaattatgtcagtttagcaaaagaagaaagtgaagctcaaggaaatagaatgtttattaagaattcttcaattattaagttatggaactggaatcagaattgggtccttttgtcaatctgatgaactttcaggtatatggtaccatctgcaagttctcagtttatagagaagtttatcattttgtcaagtactttttgcccataacagaagtattattgtataataaaggttttaaaaataggagttttcataaacaatttgtagtttattttggagacaccagtaccctactcttgaatgacaagtgactatgactatggccaataatatcaaatagctgacatgtttcatttagaaggaaaaatttctacctattccgacatccatacccagaacctaaatggggatgtgctgagtatgttcagaatgactgcaaccctttgtttttataattaatttaatatccactccaaagcataagcaactagttggcagctaacaaatttactgaaggagtttgagatttcatttgtatcctaagtgttttatcaaaattctgaagcaacattcaatgcctaagagaggcactcatctacataactagcagcaatatgtccataggtgtaattttattaatatattctttagctaaataatagcagtagttttccccttaggaccaatgacttttctagttgcagtgtcatgttctatctcacagaatctgcttaaaatccaatcaagatgtagttactttctcccataatatttgtgccactattgtaccagtatgccaacaggttactgttatagattgcaaggtttgtaggtacgtgatatggatgagcatttttctctttccaatagtatacaaagtgccttcaggccaccatgaatgtaactcaacagtggtgaagcttcttgttgggtactagttcatttcgtatgtgttcaatgacataagttgtgtctttagtaatagggtctgactatcaattaacaaaagtaaattaacacgtcaaaaatttttaaggattatcctgattttagactatagatacagtctgatttatgttataaatactatgggttttgtgatggctttcataagaatgggccccataagatcatatatttgaacatttgattgtcatttagtggactatttaaggaggattaggaggtatgacttggaggaggtatatgactaggggtgggctctgaattttaatagcccaatccagtcccagtaatctctcttcctccattttacagataagatgaaagctctaagatacttttctagcaccatgtttgccctcttacctacctgccatgttttccaccataatgataatgtactagccctctgaaagtgtaagcaattaaggtagtcactaatctgattaaaggggaaggtccattcagataccctctccaatattactaagagtcttagctggggtaatccttgtggattcctggaggtttccctggcaccaggtttttccctcaacccataatggctcttcctatcaagatatgtctttcaatgctctcaccctctgcccctcctccaacttggtcatagaacttacagccagtaactgatagaagcagatgcagtgatccatggccaagaagtggggtgaattcctagagttcagttgaagagacggaggagggttcatatgaacaaggggagattcacaagcataatcatggagacatctgaccagcactagtgggagctcactgactctgaactgactgctggggaacctttatgcaacaaaacccagattcagagggcctctgaatctgggtgatagttatgaggattgatctgatggggagacaggttcaggtagtaggaccagagcctatcctgagtgcatgaactggatatttggagcccattcttaatggtgggatgccttgctcagcattgatacaggaaggaaggtattggtcctgcctcatctttctgtgccagattttgttgactctgaaggaagtccttaccttctctgagaagtgtatgagggtgggaaaaggggagtgggggacgagagaaggggagggagggagaaattagggtggtatgacaaatgaaaaaaacttttaagtaaaaatcaaatgaacacagaaaaaggtgtaaacatgcccttcaattaaatgatttcttttataatctaccttggacatggtgttttttgatagaacagcaactaggacatttggtgccagggacttgggtaatgctgtgtcaggtcagaccatgcggttgatagaataatgtggaagatttgggaattttgaactagaaaagccattacatgctgtaagtagggcttaatgggacatcctagtaggatcacagaagactgcagtgatgaaagaacaattctcaactttatatagaaaaacaaacgtctaaggataggcaaaaaaaaaaaaacctataaaataaaggaatgtccagagacatcaccatccctgacttcaagctctattgtacaactatagtcctgaaaacagcttggtagtggaataaaaatagacaggtagacaaatgtaatagaattgaaaaccctgatattaaaccaaacacctatgaacatctgatttttgacaaagaaactaaaattatacaatggaaaaaagaaaacatcttcaaaatatggaactggtgcaactggatgctagcatgtagaagactgcagatagatccatatctattgccatgcacaaaacttaagtccaagtggatcaaagacttcatcataaatccagccacactgaaccttttagaagaaaaagtgagtggtaccctcgaacaaattggtttaggagacagcctcctgatcataacacctatagcacagacattgagatagacaataaatgggacctgctgaaactgagaagcttttgtaaggcaaaggacacagtcaacaaaacagcaaagcagcccacagaatgggaaaagatattcaccaatcccacatctgacagagggatgatttgcaaaatatacaaagaactcaagaagctattcacaaaaacaccaactcatccaattaaaaactgaggtacagacataaatagaaaattctcaatgagtaatcttaaatggctgaaagacacataagaaagtattcaaaatccttagccaccagggaaacgcaaatcaaaacaactctgagataccatcttaggcctgtcagaatggctaaaatcaaacaaaccaatgacagcttatgctggagaggatgtggagaatgggaagcactccgttgctggtgggagtgccaacttgaacagccactttggaaatcagtatggagattcctcaggaaaatgggaatcagtctaccaaaagatccaacagttcttctcttatgcttatacccaaatgacacacattggtacaaggacatctgttcaaccatgttcacagcagcattatttctaatagccagaagctggaagcaatctagatgcccctcaactgaagaatagatagagaaaatgtggtacatttacacaacagagtactactcagcagggaaacaatataatcttgaaattcacaggcaaatggatggaactagaagaaaccatcctgagtgaggtaacccagtcacaaaaagacagaaatggtacgtactcactcatgatgggtgatgtccttctgtgtatatgtttgtctcattggttgataaatacagtagtcttgcccaataggaaagcaagatagctgggactagaagtcaaggaggattctgggaaatgtagtaaagaagtctgtgatccagacaggaagtgacatagcaggcagacttagaatataatcagggaattgctcttttgctcttgttcttccttctgttctctgctctggtcaacaccatgtgagcctgtcaagacaggatgcatgctgctggcatcctcggtcagataagtcttataaaatatacagatttatgataattaagactgagctatagccaggtgttggtggcactcacctttaatcccagcactaggcaggcagtggcaggtgagttcaagaccagcctggtctataagagctagttccaggacagcctccaaagccacagagaaaccctgtctctaaaaccaaaagaagaagaagaagaagaagaagaagaagaagaagaagaagtagtagtagtaggtagtaaaaatactgagctagcatataagaaatcctagtcaattggccagcagcatttgaaactaatataaatgtctgggtgatatttggggccctaaagaggcagctggcagtagtgttagaactccatgtaaacttcacaaaagcttaaaaagaaattttagcagcaaaagagcagagacaagcacgattttttgttagcagcattttcttggaaggtctctgttttttctttcagagagatttcctgactcagcctaagtgaaaaaaatgcacttctctttttaaaaggtctggctagctcagtcagtagagcacaagactcttaatgttggttcatgtcccatgcagctggcagtggaagtgaccatatctcaagcccgcagcctgctacttgatggcagcatagataaaggtattgagcacagctctcagtgctgatggtaaacatacctctgccatcttggaaacatagcagctaagaaagtcaccgctttaactttagcagtgttgtttaccagataaaagactgagtgaccatgaaaaggtaaagatttacaataaaaacagatgaagaaaaacctctaaagttttacaatgtgtttaaaaatatatgtaggcttctaagaaaaaaaagaaacaggaagaaaaaaagagtagctgtatgtggtggcacacacctataatcccagcacttgggaggcagaggcaagaagatctctgtgactttaagactagtctggtgtacacagtgaattcaaagacagccaaagttacacagagaaaccctgtctcacaatatgaaaaaataaaagtaaaggtaataaataaatagccacgtaaagatgaaaaatacacaaagaatttggatactgtatgctacattgttgtctttaaattgtttgattgccaaggaagaagcaatagccactaacagatatttgatttatcaatgctgctaaattaatccaacttacatattttaaaaatgctttgacttcaaaacttaagtctaaggacaggctacctggaaaaataatttttgcttttgtttacacagaaaatgaaaagctatggatttcttccagactaatatggtttgatcaagcaataccccctgaagcagtggcctaactgatactacatacaaaatagctgagatgatgcagccatagatgactatggccagatttctgtgttttatcatgatcccagggtatggacatcaccccaaccagcaggaagcagtttggaataaatgatattcaaatattgtttataaatgtttgttttcatttaaatgggtttttttattaatagtaatagtcagtcaatttctttttaaaggaaaaaagggaaataggatatggaggtgaatattttacattggtatagatttttattgaaggatacaaatttaaggtcaattttgtgatatacgtaattaaatgaagattatatagtcaggtataatagtcaaaacatacagttatattagttaggttttctagatatacagaaatgtatttgagatgggtagacattctttaaacctttcaaagacctatagaatatatgacatttaaatggtttaggtttttttcttgatagtgagacacaactgctcctggcacaccaattacatcagaaagaaggatgggtatcaaagaaacttgttatggagtttgcctgcaacatggaaagattagccgtttgggcaagaaactgctcttgcctggactgtttgttgctgtataaactgaacatgcaagacccacaagaaagtgactgctgaacttacaaaacaagatgaacagtcctgaagacttcctgcttcatggaaagttgccagacacactgtggcctatgggctgaagatggatgccccaacattacagagtaactttggatgactgcccaggcagcaagatgtctctgacaattctagagtttatatattattcttctgtggtctttgatggagttgaagacagttatggttatagttttcttcagttattacaaaagacaagttacccttatttttatttagacagaaaagaggaaatgatgggggaggttcttctgtgtatatgtttgtcttattggttgataaataaagtactgttggccaataggaaagcaagataggtgggaataggagtcaggaaggattctgggaaatgtagtaaagaagtccaggcaggaagtaacatagcaggcagactcagaatataagcaggaaattactcctttgctcttgtacttctttctgctctctgctctgatcgacaccatgggagtcccacaagaaaggaaaaacaccgctggtgtcctcgatcagacaagtcttataaaatatatagatttatgataattaagactgagctagcatcttagaaatcctagtcaattggccagcagcatttgcaaataatataagactctgtgtgttacttttgggcggccacatggtagagggaatctggagactggcagaatgatttatcattacaaacttatatatggattttagacctagagcaaagtattactagtctacaatccacactgccagagaagctaggaaacaaggaagacccgaagagagacatacatggtcctctggagaaggggaaagggacaagatgtcctgagctgtttaagagcatgggggaaagggtgagggaagtagaagaaagagaattggagaagaggaggggcgaggaaggcatgagataccaggaatatttagtcaggggaagaatgttaaagagaattctggcactagggaaatatccagagatctccaaggttgaccccaactaacaatctaagttaacaatagttgagaggctactctgataatgagattgatgactaccttatatgccatcttagagccttcatccagtagctgatggaagcagaaacagaaacccacagctaaattctatgcatttacctatgaaaaagaagaggaatctatacaaaataaatgttaatattacaatgtagcatgattaagttctttcgttgttggtccttctaaccctctcaggaatatgaagaacctcaggaatattatctgggaaaggcatcacggtgtatttactagcatattagaattgctataatatttcttattcttgttcctaaaatataatctaagttaattttcagagatatagttatccaatactaccaaattttatagtatgtatttcatgctccacaaagagttatcaaatagaagatcatcagagaaattgagacaatgttattactcctccaagggaactcagtaagagctctgggttgtactagagatcttgaaaaacagttttgaatgaacatttaggagcagaggtgagttaaatattaggctgtttctaatttcctagagcaggctcttgaggcacatcaaaaatatatttgcaaagatttcagtggcaaagaataaatacaaagaattgctcaacgtataaggattgatgtcctagctgtagctgcaatgacttccagaacatttagtgagttacttttatagagagaataactaattcaaagacaagtgcttaattgcaagatttccagtatatatattttcttgtggcggagtaatagctaatttcatggtctgcttatataatgctcataaaatctctatttaaatccacagtgctcagatgtatccaattactgtttctcttacctcttgatttacccagaaatgttacaacaaataagtaaaagaaaacttttcaacaagaatatatgttcagcccaccacagttgtacaaaaacaggataacaaaataaaaatcctttcagaacccataggacataaggcatgataatgtcttctactactatataggaccaggaagtaaggaaacatttgagaaaagaagaaataatgatggttgatacattaaagggatatacgagtcagctaaaatgaatcacaatgacccaaacaggaacaagttgagtgatgaaacaaataattttggattgaattgtaataatacttgggctaaaaaagtttgggttgaattcaaagaacaaaacaaatattcacatatttgttagaaataaataaatagtaaatggtgagtaatgcactagtaattcagaaattatttacatgatgtatctgtcctgactaagaacttaaccttgtatttctagagggtagacatcatatcagggcagtttgacaatcccaaacttctgtccatgacaatatcaaccctgtaagaccaccttgaacactcattgaagtgttatgatctaattccattctatgattgatgtagcaaacttctttggcctcctttgtacttagctcttcagtgatgaaaaatgcaccagacaaacccaaaggaagttcatcttaagaaataaatagctagcaagatcatcagaataaagcaaatctgggaaattgttccagtcaaaaggagcccaaggaacccagggaacacacagtccacagtgcacggagggaaattagagtaacaattgctaagccactgatactgaatcactgtcacaaattctcatgtgtcatccatgaaggcatagtagttactatactatgcagtattctgtaaatccaaagaaggtcttaagagtttagtttaaatggagaatattggctacaagtggtatttttcacagaaatatacacattcgtggtgttaccttccttgagcttcttttgaacggaatataacatgtttatttttctgatgttctcctttatgaaaaataatgactcttgggtcttgtaagcaggtttaacatgaaagtattccttatatctattgcattcagcttaatcatagtgatgtttagctaccatatttctgaaattcaaaaatccatgttctgagactgctacacaaaaaatagtacagtcttctttagttaattttggggtggaacatgtcattaattcctttgcatataatattgatatacagtgtattgtacccttctgtgttttttatgatttggaacatcccttgtttgagtttcaggtgcttctcttattttttgaagtgccactgtgaagaaaaactttatgaaaatattattcatcttacaaaatgcatttatgattttattcccattttgaaattgattagatttacatgtgtggcagtttgtactgtaaatcattttctggcttaaatgatgatttttgttgcaacagtactgaatcagcatttttagtttcaaagaggagttctctcctctaaattttataagaattaaaactttacaagaaggatttattccttcacaggaaaaatgtgtccactctttcaattagaagacacctattaaattcctttgaaagacattggttagttttcattgaggtggaaataattctaatgaaactattttctttgaacaaaagcaatttaaggctttgctttctgtggggagaatgagcaaaagacaagcctttaagaaaatctgtcttgataattaagcatgcaagtgagcatacataattatttaacaagcatgttccagaaaatagaacatttcagactaattgatggaaaaactagaaaatgttaatatctgcagggcacaactgtacatgtatgtgtttctacgaaatattacttttaattatcttcttcatcctggagaaatgtaaagattcagagtttcagtttttctttgtttacatttgccatattattacttctgataataacatttttattagctcttaaaactatgacttttttctaaatccagatttcagactgaaggaatacatggacaagttctttcaatgtgtcacttctataaactgtgtttattgatatagttttgagctgatactaaatgtccagcattgatgctctcttctgagaactacatttacctcaccatgttttaaataatattaagtgaaatggcttattctccctaagcatctattcttgggttgtttggaaatgtgaacctaaggtgtacacaattaaagtcattgagtcctttgctgggatagatgaccttggtttcacaatacagttaaatcgtgtttacctgtggtatatgtaagtgaggcacagtgaaccaccaaattagactactctgtgggtagaaaaaaacaattgattggggaacaaactgaagggctgtctcaaaggaatagaaatcaggtggattttatgtgacaggagagtgggatctttgagctgatggttcagtttgggtaaccaggacctagacatcattgcccaaggcagctgagtcttgggatgtggataaaaaaagtagtggctttcttggtaaacagaaaactgtcttgaaaattcttgagcaatgatgagtttatgtttctgtttacttagtaacaatccttttttaccaggtcagagtccccctgggttatgtataggtagtctgcttagggccctgttaacaggacagtcatttgggatccctgatactgatctaatagtgcatcttcctgttatactggaaggtgttatataggcaccagctcaagaatccagcacatgttgcaaacagaaaacatacctacatacccaatacattaattatcttttctcttttgtttctctggctcactggtacccatcttcttatcagacacaataatttccagcctggttctccaaatctttcttcatctgatcccacaatttatttttctgtcactcatgtttcctaaattctaaatgcttatggaaacatgccaccaactctaaaatcttgtccttgacttctagggatgcttacacaacctagaaaatcaaaaggaaataaaatcatcacaaatatctcaatgcgatctgctgtacagaagtttctgttctgcctggtactgcaaccatttagtaccaagtaaacatacagatggttatattaattataaaatgtttggctaaacagtcaggcttcttattagctggctgactcttaattattaacctatttctattaatctaagtttttccaaattgtcttggcttaccaaagaatgcccaggcatcctgccttcggaatggctacatggcaactcgcttgtggctcttctctgtgtctctcttcccagcattctccaagtctggtagcccctcctaaacttcctgactggctactggtcaatcaacatttattcaccaaccagtacagaaggacatcaatctggagtttcaaatatataaattccattaccctaggatgtgatttgttatctagcactccctgcaagactaaactactggtggaactgtctctgaaatcctgctttcctcaggtttcctccctattctctttttcccaattcccccttggtgtgtcctgtaatgtcttatttcagaattatgtatactcaagaactgatcaagattctacttctggtagatcaagacctcctatgaagctaatttttctctcaagttattcagagtatttccaaggctttggtataggtcccttttacttaaatggagagcacacttttttttcctgccctttgcttgcaaagaaaatttagacagaatagactcttacccaaatattgtcagtagagcctgaacattccaacttgacaattgtgagggtgatattattataaaatttgcaccgtctactctagtagaactggagtatgtgaccaaatgctgacatttgagttatttccagcagttatatttaatttaaaatttacttatttaaaactatgcttgaactttgaactttaacatatatcttaacttcaaaagtcacaaaattttataatctattgttaacttgcttagatgatcactactttcaactttcttatatgctgatcttgcaatatactatgtttctcttttctctatttaagaaaaatgatcttcatcacaaggactcatcctgaaattcctttctgtgacataatccaaatttctcactcataccaaggtgtaaatccctaagtttggaaagatcctcaggctacagcctatgaatgtcagtcactgtgacaggaaagacttcatcttgtcttctcttctgcacaatgccacatggttcttttttgctattttgtaacttgagaagatgtgtttccctagcaacacatgtattttctggacttttttctctggcttaactagaagataggtctagactcctatgatatgggggtggggtcaatactacagaaaatgtaaactaattcatgtgagcattgcttgagtttaagtctatcagaaagaacaaagggctggctttccctctttgactgtacttccttaaccttttatttacttcccttcttcctccagtcatatctgattcataaagatgatatggtaacagtacccatgggcatgaatagtttactgactgcagcaattggtggcttatggaagggataattattagcaaaaagaaagtacatggtgctgttctctttgtatgggaaaatgttatataaacaagcctcccttcctttcaccatgcttgctctatgataatggaccatgactattcatcccaggcataagtgacttattgttagcatgaattattactattaatttgcttccaacaaggcaagcctctgactcccatgtatcgatagccttctcccaaacaagttatagaagcttcctcgccttaaattaatatgtgagtattttccaaactgcatgcagatgatgcatgatttcattcctgtttaatcccttctcttgttttgtatttacttattctacttatatctttgtggataaaatgcattaaaagtctattatttatttgatcttaaaaactaaagagaatattttctggatgaaaaatatcctgaaatgctcaatttatattaattttcaattttcttttagaatcagcagcaatagtcacatagaggaatccatgccaataatgctgctggttttcacttcaatttcaataggctcttcataaacattaacatgagtcaagaactgcaaggggtgatttaaacagactgcaggatccaaagatatcagaatcctttcttccccttcccccttccccattttctccatctccttgtaatcttattctattccctacataatgacactacctctagtctttagtaaaattgcagtgctgattgtgacaatacttacaggaacatctatttactttaattatagttactgtaagaccagagattctattgcatactctcaggatgtattttctggttatcataatattccagcttctccatatcctcaaagtcacatgaatctgtatttctttgctaggccacacctgtagtagattacaaagcagaaaatagcatgtccttatttccccttcattttgaagaatccatgatcatattttgcaaaatggtgaagacagctgagtctttcacaggcatttcctgactaatttctgcctctcaaataaccttttcctgaaatagaatacattcaagtatttaaagagattatttttgaatcaaattatttttatactaaacatgcaattatagtctttaaattttattccagattttgtagaggattagagaaaataattattttttaaaaacctactcccaacatttaatattttggtgtattttcttcccttttaaagcatttaactattttagtttaatagaagacaaagtattttttaaattcagtctatgtcttagtgaatctgagatttaataaagcatctgtgtgatagtaaaatcactacagtgcaagaatttcttttgtttttgttgttttgcaatgcttttctttaccatgatctcattgaaaagcttgccttgatatccatttgatttcagtgttcccaacttgtagcaggtgttctttatacttaacacaaattcagttttgaatgttctctctttgagttgcactgacattgtttttgacaatttaaatatttcactaaatctctattattgagagtaaagattagaactaagcagatttctagataacatacaagtcttgaatctcaagaaaacacttaaactgggacagtgatttacattatatactgttcttgcagagactggagtatagatcccagtactcaggtcagatactgaaaaccccctgaatttccatctccagagtatctaatgccacttttaggtatctgcaagcacttaacactggtatacactgacacaattataagtaataaaagtaaacacttgaaaatatgttcaaataagtgagagtagaaatatnnnnnnnnnnnnnnnnnnnnnnnnncacaaaagaatatttcagtcatcttcaccatgtgtcagaaaaaaataatctcaaatcaattgctgaacttaaaaagaaggaagagacaacaaatcatgcaaacaaatcaactgaaatcattcaaattatatcaaaagaataagtaacataaaaataacaaaataaatgaaatttaaagccaatattaaaaaactacatctaaaggctggttctttgaagaaaaataaacaggcttctaagcagtttaactaagaacagagagaagagatgaaaattataaatatcaaaaatataaaaattacaaaacagcattgtgtgtcttagatatatgaacaaatttgaaaacatatacaaatgttcagttccttgaagaccaaacctgtaaaaactcacaccaaagaaaaacagctatcctaggaacattattaaatagttgcattagtaatagtcttccaaagaagagcaacaactctagatgacccatagctgaattgccccagatatttaaggaagtattcaagattgtcaaagaaaagctcttgaagctaagtggttggagcaagtttgcttgagaaaaaatatctaggactcttacaagagacacagcatacacttagttgtcgaaatgacaaccatttgtttctctctactttgggggatgggagatactgttttgtgctacaagatcagtttctggcagaggatctgaggctagagttggctacattcttgctgtatctctttcagctaaaaaggtgaggaaggtgtgttgaatctgtccaatagagttatattcttctgttaaaggattctatatgctgtcaatcagacaggcatcataaatgatgcaatggcaatgaggtaaactttgtttcctgttgtgtcagttgtggtggcacatcataaaaataattaccaagatctccccttcctccctgttgtagaaacatgaggggcctaagaatgccctacaatctacttcttcctgataagaaaaaggctacatggtgaccccaaatcttacaatggatgagacacttcttcagaaattgaagaatatggtaaatcgctctaaaaccactggaagaaatagcatgaaagaaaatatatttcaacgattccttgctgatttctactgttagtttggactctgttgtcatttgaatgtaattcctgaatgctcagtcacagagtcacttatatcaaatgaagggcaataatatttatttggttgttacattcagcacatataatagtaagaacttaattaggcaacttcactgcccattgctttactttcagaggtggcatgttgctgttcatacaaagattaaaagtaactttgcttattgctgaaccaaagagaggtgaaaacttcaaaatatgggagaaaaataagaatctctaggccttggtggtcaacaacttttgtcctacaaatcaggaagcagaggtaggtagacctcttatttcaaggccataatagaatacagagtgtgatccatttccaggaaggccagggttacacagagaaactgtgtcttaaaaacaaaacaaaagaattacagccctttttggaagcagagagaatagttcagagtgcagggtatggtccaaggatcagggttgattacagaaataaaacaaaatctttgtggtcacagatcaaaaggatttatagttttagtaagtcttagaataagatcagtaacatttagagaaagagaaaaatctataaatttagctgggtgtggtgacttgcactcataatcctgactcatgaggcactgtggcaggtttgtcatcacactcaggccattctggcctctatgctgtgatactctcaaataaataaataaataaataaataaataaataaataaataaataaaacattcaatgatgtattctctctgtcatcagaacattattgtaactattaatcatgttaggatacagaaaagagttgggcagtggtagtactcgcctttaatcccagtacttgggaggcagaggcaggtggatctctgagttcaaggccaaccttatctactgggtcagttccaggtagacacagctacaaagagaaaccctgtctctaccctccattctcaaaaaatattatcatgaagaaatcttacaatttaaatacaatttaaaaagaaaatgtactgacaacgcattaagagaataataacttccaaaaaagccatagagttcactttgttctggccatctaatcctaggcatgggcctgtccctaggagtcttttatatcctcagtgagactctgttgaagaaaactggatgttttttgcaaatgttttaatttatagtagcctctgggttaggggtggaggcttgtgtctatatccactctcagcactgggaccacaccaacaggccaccttgcatgttgatgcagtctgtgtgagttcctatgttcactggccttttgtgtttagggggccttatttccttggtgttctctatttcctctggctcttacaatctttctgtctcctcccctggaaggttccctgagcactgagggaagtcatttgatagagatatcccatttaggtctgagtattctaaggcctcttactctctatgcattttcagccagtggattactgtatttgttcccatctactgcaggaggaaatttctctcaagatggttgagcaacattgcttatctattggtattgcagaaagtcattaggagtcattttatttctaaattccttttgcaaaacagtagcatttcattttcccataagtccaaggattattttgttcccggtgcttggccatccaagcagtgctggggatggactccatctcttagagtgggccttaaaccccatcaatgtatgttggttacacccacctgctttgtgtcactgttgtaccactgtatttttcagtcaggccacccttttagatcacagggtttgtagctggtttggtgtttacaattctcctctggtaatgtgcagggtattatccagtaccatgaacactactcagtaggggaagatgcactaggtaggaactaattcaacttctccatgttcagtgagttgtgtaggtgttgccctcagcaagagaaccttaccatcagtttgagaagagcaaccaaagttgtgttgcttggtgcttcctttggggcccttctggccaacaactgattagatgggatccattcttggaactggaggcttcatttgatgaaaagaaatatccagttgggcctcctactcctcattatttagcaattcaatttaggttatcttcatgtatgcatgtgccttaggaagcttctaccatgtcaggtttctataaaaacactcaaatggccctttgttttagttgcccctcctactactccaatcacatacccctcttccctgtccatcccatttgatcctctcatccagtcttccacctcccagtctatcaaaaactatctatttattctatttctccttcctacaaagattcatctgtcctgctagttatcttggccattctcattggtataagatgaaatatcaaaatagctttcatttggatttacctgatgactaaagatgttgaacatttcaagtgtttttcagtcatttgagtttctccttttcctaaatctgtttagatctgcaccacatttttaaatccagttacttattttcttgatgtctagctttttctgttctttatatattttagatactaaccctccatcatatatacagatagtaaaagtcttatcccattctgtaatctgctcctttgttccaatggtgggcaatgtcatacaagagcttttgagtttgatgtggttccatttcttttcttaagtcttctttatctggatattctgttcagaaagactttgtctgtgctgatgattttgagactcctcactttctcttctatcagatttggtgtatctggtcttttcttgggatctttggtcctttgagctgaggatcagattagagagaggagaaatacttaggtttacaaatattgtaaaccaaacagtggctagtatctataaaataattacccagaaacagatcttagtttaaaaattgctaacaatattttcgaaatttaataaaatcatccatttatccacaggtgcatttgacagataagtgaatgaggggaaaataaaacatacaaagtattttatagtcaacctactgaaaatccaatacaaagagaaaaaattccaaactgtgagaataaaacacactgtagggagcagagttatctgatctgagctgcagcccacagaacaataggtaatctctgagaccctgaaaacacttagcaaatcaagaattctacattcaacagacaagtctccaaacaatggaggtgaaacaaaaacattttcacataaaagctgaagagatttgctgctgtcttatctaggagacaaaggctgtcaatcaaattcctgcaggcttaagaaggagtagtgacagcacaggaaaggcagggacacagaaggtaaaatggaggtgccaggcatccacttgtgaggctttctgaaaagattcctgtgttctttgaaatcccttagatattaactcactgttcaaagaaaactatcatcatcttgtttaatgtgaattttgcagatataaaacacataagaagaatatcactagcactggaagaagtataggtgtgagcttcttattacatttcctgctaactataaagtggatacacacatttttgttgttgttgttctccctagagaagctattaaaatgcataaaaatcagaatatttaagtgtatattatatagtgtatgtaatctttacatagtctattacaccaaaaaaaatgacagagtcaggtgtggtaacaaccccataagccctgtactcagaaaatagaggcaagaggattgctccaagttagaggtcagtcttgattgcgtagtgaattccagactatatgctgagatatcatctcaataaacaaagatagtaacaaaagcccaataaataatcaacaacaaaaattgcaggaaagtagcgaattgttggccaattctgatgagacctacacgtaccttaaatattaataagatggagagaaattgtgaaatttggtttaaatagttcgctctcactattttactgaagatatatacatgagtagaatagatgtgagtttaatgaacacatgcctcacctgaactatggagacggagagtcagagcctcttatacaatccccattcatgagctggattgaagaaaaataattttgtaaaattttagattttattttattttacaatatgtgcttttcctgggtatttgcatgcatgccttgtgtctgtctgcttgcctgcagagagaaagagagtgagcatcagatctccttcaactagagttgcagggcattgtgaaacacaatgtgggaactggaaaccaaataatctgaaaagcatcctgtactcttaagaatgagccaactggccagctccataactggaacttcttaactggaggaaaatgaaagctagtttgtttgttagtttggttgtattgaagagagtccttggtacagtaatggaaatttttattgctcattttgttttgatcatccccagagggcctttaaagcttttcactagggcatctatgtattaagggaaaggaaataatccaagcttgggatgctaatactgtacagtgggtgtgtatttgaattgtctacagaagacctaagataaaactgtggttcatgagtcagagtagtgtcttatgaaattaagactcattatagagtgcagccagtgttatcccacagatggaccaatgtggcagataaaatgtatcacttgaatcaatccacttggcatagaatgcacctttatattttcacttatctcagagatgtcatgctgccaaaacaaagtgaaggcaccagaagaggttaacaaggaaatgaataaaggaaaagtagctctacattgaacaagggaggtagctcagtctatataatcagttgtcatgaaagcaagagtacctaggttcaaatccccaacattcacataaaattaggcattgttgtacttgcctgtaacaccagaactgagggtaaatgaaaactctcccttgactgccagcctggccaaaactgttagcttctggttcaggtagatggcctgtttcaaaaagttcagtgcatactgataatggcagacatcatgaatcttcctctgataatttcatgtggttgcatgtccacatgcgaggattaactctctccccaatctctctctttctgtctctttctgtctctctctctctgtttctctctctcttacttacacatgcacagacatatcctatgcaacacatacatgcacacatatgtacacaagcacacacatataggtatacatataccacacacacatactccacacactcatattatgtacatatgtacacacatatgtagatgtattgtcacactatgcatacaccatacacacttgcatgcacacacacacacacacacacacacacacacccaaacacacacaaacatacgcatacaaacacacactgctacaatcccagaggcattttgaagtctgtgcctccatcaaggacttagaggctacaggaatgaacaatgattcccatgctattctattgaactcatctgtttggcctaagcagcagatagatggatcctaaagaatggtggatgattattttaaagacacccattttctaactcccctggcagttgctccaccagatgtacttcctttgcttgtgcaaattaacacatcctttgttgcctgatatataactattgatattacaaatgctttttccttatatctgtcaataaagcccacaaaagtcaccctaattaagatgaattgattgcatattttagattgcatactttagacagacctggagtcataggtaaaaccatgtcactaaatttgtgtgcatatacatctctgtctttggatcattgtgtatacagaattcatagacatcttaattgacaaatttaaaatgtattagtggtatcaggaacaacaacaactaaaataaaccaataagcaagtcttgactggtgcatggcatgctacactgcatgggacatctgatccagcagatcaagtgacattcaaattgtcagtggcaaataaagatgccacctggagccattggcaacctctatcattcaataataactagagtccttagaatcctttgagcaaaatcctaaccatcctgtcgatatactagaccttgggatcttttgagccttcgtgcatactcaaatccaccaatttgttgttgaacttctgagtattatcagactcagcaacccataaatgtggatgcatataggcatgaaataaaagatgggcagatactgctggcttcagcgaggccctgagatcacaataaggttcatgaacaactagtacaattttcatggttacaagtattggtgcactgccttctcactctaattgaataaccatggcatcattgagatattcttaaggtcatttataacagaagttgatagtccaaggcctggtttacagatgctcagtacactgtgtatgggctactgcaccactgtactccttccttgaagaatgttgaaagaaagaattgaagtaaaattcttcgtgaattgacctttgaacaatgtgctttgttgtaaaatatccttagatagagaaacaggcagatggattatgaataataataaaagtggattttatagcttgacataaacttgtattaaactattgttgaaaatttggtcaccaggaaatatggggtagtgttagataaattcctccaaatgctcctcaagaggatcagactgtgttttttgagtgctcactatagccacctcattagaaaacacattttagaactgttggatagaaatagctgttctgggaagactagtcagccactttccatggacacacttgtgttgtcactcaagagaatgatgttgtgatgacaggaagggtagcatccccaggcacttaccatggcacgtcttctgatgttcccacctaaaagctaaatctttgagctacagagagggccactcttccagggcatggccatagtatctagggacagctattagctgcctggtggaaagtagactatactgggctgctttttcatgagaagaccagaagtttgatctgttaggagcatgtaaaatatagatttatcttctttatatgatatgcttgcaatgctttagtcaacactcctactcaaggatgtccatgtagcctgcctgatctatggcaataatattacccatggtattttgtgtgaccaaggcctacaatttatagcaaaatcaataaagggttcaaagaagaattctgacaatacctaaagaacttccatgtagataggcagcacacttctacacttctacacagatgtccaacacacttccaaaaagatattcagcacacctcaacacagatgttcagcacacttctgtgcaaatgtgcaacacatttctgcaatgatgggaagcacatgtacaacacactggtgtgcatattctcagaacacttccccacagatgttcagcatacttctgtgcagatgtgctgcaaatttccatactgatgtgcagcaagcttctgtgcagatatgcaacacacttgtacacagatgtgtagcacacttctacacagattgtaacacacttcagacagttcattgataaaggctctttggttaggtggtactcatgtttactctccatcattatttgtcctggaaagccaatgaacataaccacaaatagtcagtacttcagtctgcacagaaaagacaaaatttattcatgtatttttaaaccgtcaccatgtgtctcaatttgtgctgaaaaaaatcactactttagcccaggctggcgttgaacttctcatagaattttgtttgaatgagaattggtataattatattataaagatgatgacaaatgatctaagtctatacatattcccatcctgcaattttatgattttaatttataaataagaaatgaaagtaacaggaaataatttcatcagaatgtatgtagcatttttattcataaaattatgaagtgaaaacaaccccaaactcatctaagaggccataatgaagacatctattgatgcaattgcattatggaataagaatctagggcacagaaagcaatatagctatttgatagcttatgttgaatggcagaaactaggcaaaagctgtatcaatgacacctcacacaaacactccagaacaaggtaaagagcagggatacatcatttatgctgacacaaaacagagcaccactttggtgactgtaataaaaggatattctaagattgtatgcagactctggaatggtcaatcaaagcagtaaccccacctcttgtgaggataagcagggtgatatcccaagtcaaatgtcagcctgagccacagagagggctctagtgtaggataggactcagcctcaaagtgaagagggagaaaagaaagaatggaagtagaaaagatgcattaaacctccccatggtggttaaaatgctcccttttgtgattttggtagtggttggtggtgaatccatccagaaagactcatttcaggtccaagaatttgataacatttaatatgtatccacaaaagcaaaataaagtaaaattaatgtattgtatggcaaattagttaatggaattcatgagattgagaccttgtgcatttcaaccacttactcaaatacattgatgtctgtatggtgtgggaatttcaagcattgataaatattcaaggggatgttgattgacaagcctcagtatggtttcagaagcagaaataactgagatgcttcatagtctgaagatggggtttggatgattttccttttcaaaacttcccatttaagtagctattcatcccacgggctgcaatcaacagtgttcaggtgtctctaaaatttcatgatcttgtaaattaatgtccaaattgaacatgaatcaggtcagtgaattaggaattaattcatcaattgcccaattagaccctgtagatttgatttgttctctgtttagcagaaaaacaagtaatagttttttcagaaatgaatgtccaaaagtacacacacctatactcacacacagatacacacacaaacacacacacacacacacacacacacacacacacacacacaaccttttcattttcagaggttcatacaattataattttcataaatacatatttaatttttaattgaatacactgagacatctgtggatccccagaagctgattttcgatatagaagctgccccaaatatagctacctagatttcctgagatacaaatgtacaatggagattagagtggagctctgaattcccaaagataaaaaaaaacttagcgtcctttttgtattgcaatcaccattcctaatgaggttatattagaagagagtcatgctaccaaagagtgaagtgctttagtatgcaataataatctggtattttgtccttgactcctatttcattatcaaaatcgtcacccaaataccttacaatagagctgtatttatatagagagtttttgcagtgaaaattaaagtacctcactagtcaccctctctctctctctctctctgtctctttctctctctgtctctgactctctctctctctttctctttctctctgactatgtatagaacaagaaaaatgaaaactgataatatttcagtttctttcattcattataataccattggaaacacattttttgtgatgccagtcataatttcttctgagataatgtgctgtcactacaaatacattggtcaatgtggtgataaaaaatattatgatggtgctggagaaattaatctgcaattaaaagaaactgctgctctttcggaagacctgagaccagttcctagctcccacatggcagcacacaaccacctgtaactccagctgcagtggtattttgtcctcttggccttgatggacatctttaagagtgcttagtacatccatccatccatacatacatacatacatgcatacatacacatacacacataaatatgcatataatatatataggtagattttaaaagccattattataatggtaataatggcagcttattttcatctgtttatgttatgaaataaaaatatttaatattcaaagtattcccaaatatatgattatatttttacatttaatattataggtggaaatcaaacacattgaatgatttaaaattttttcatgagtcatgtattataatatttaaaatgatattgcatttaaaaatatttcatttctacttttgagattataatataatgataccccctctttgattcctccaaaccattccatgtaccctaccttgctctctttcaaaatcctgacctctttttctttaattattgttacacaggcacacacacacacacacacacacacacacacacacacacacacacacacacacacacacttgtacttcttccttcctgtcaatttcatggcctcctttttctttaattgctgctatatcaatcctgttttgtctgtataatattctttataaatatctttgcagagctgacactttggtttagataaacaattcatgcactcttcttgtgggtaagtgtagttctcacctctcattaaggaaatttctccttgaaatacaaagagaccattatagaaaaccaaaacaaatgcagagatgcagagctcagtcccaagagaaaagactcacacacaatactcaggcaacattgtgaaaagggtgaagaaagatcataacagccagagtagaaggaagttggttggagattgtgttgagtagtaatgtcagaactacacatgtcaggtcttacaaacatgagttcaaacacaagctgtttaatgaaaaccaacaccactgggcatgtaccatggacatggcatacctcaggaggcctcaatcctacactaagaactggcaacatcttgaagcattttaatattttcctcagtacctcacaagtggtttttttatccccaaagacaaaatattatatatatatttgtctgcagaaaatatttttatgcaaagaatgggtctaagagttcctatgagacattctagcagccatttttaagtaccttaatgttgctgtagctgcttttttgtctcaccaggtcccactgtcacttcagacccaaataaatacatggatgctgaattataaaatgctggccattgacgagggcttcttattggctagatctgtcttaattattaactgatttctattaatcaaagtatttctacatggttttgtcttaccagaaaacaccaggctttttctatcttgccagtccctccatggcgtcaccttctggcacttctctacctacctttcaagaattctcctcatcccctatccctgctgatcttcttaactctttggctaaacaactttttattcaccaactaataggagaaacatatatacagaagaacatccccaatcaccctaagatgcacagaactcaggattgtatgattatatgtagttactttatatgagaacattgagatgtgattattttgatgttaattgcttgcctccctattttaaacatcttaagaaacagctagctccacttcctttcaacacaagacaaataatctgaaaaacaacctgtaatgacatcaaattcacaataatatcccctttctgataatattatgcactttacatggaatatttcaatttgcatcccaatcttcatatgttaggtaacatatttcactttactataatctataatcatcctcacaccatcaaccttgctcacagttgttcctggatgcattcttcctaattctaagtctcacaatgactttggttgaactcattgctataagattccctttgggatcccaagcctccttttatttggatataatatgtacttgaatatctttatctgatcatgtctcatcaagaactatattttttattaaaatgaaacaaacaaactgtaaatggtcgtctttaaaagttaagattttggttttatttctcagcagacaaatgctaattacattatgtttgtacaatacaatgagatgtttttgttaatgtatgtgttgttgggctgcacagatggctcataccagaaaaaatgcttgcatcacagtcttacgttctgttcccaggaactcatatagagactgagctcactggagtatctgtaatatgaatattcttaacatgaaatggaaggtggagaaaacaaatgctttgaattttacagggctagctatcctgcagtgtgcttgcagctcagtgtcaagcaattgaggccctgccttaagtgggaggcaaaggccaacacataaggtgttcttcttatcacaacatgtatttcttatcacaacatgtatgcagtggcaagctcgtgacctcaaattagactcccacataaaagtgagcacacacatatacacacacaattttttaaaattgtaaacattattgtttgattaaacaaaacttattaacatatgtagcatcttgctcacttgacatgcaagtttctatagagtattactgactatagtcattgatatgcaatacttctcaaaatgctttttttagtaatgctcatagaatatgtaatatgtatctattgtataaaatggtgatgttgtgatataatctatgagaatattacttcactgtaatgtatatggaggacagaatctgttggttgttacaaggcacttgggtgtactcaaatgagaggagttgcttgttatatggctttttctttaagcagcaagagttgagctactacaaagagcaagcatatggagcttctgaagaaatggctgctgtgcgattgaaagaacctatctgtagtgtgacccccatcccagagattaatcaggctgggtgctggacaccaacagaagaggcagggacaaaaatagaagtagggggtattgagaaggctcattaataactgaaggaatagatgttgctgtttggggtccatatggtgccagcagagagggagaaagatctgagctgtgttttggagtgagaaatgttttcaaaagagagattattataaaagcagatatcttcaaggattatggcttgtgcctgacataaaattaccactggatttgatgggtgatcattaaagttctaattgtcctctacttcctaaaaccaatgagcacaaagtctgtgaattagtaagtaagcataccctagttttcttatgccaatcatcttacagttgattataattgtgaggagtcaggttaagaaggcattggagaaggttttgccgttcagacttgcttggtactcctcctttcctaacagataggatctacaaattgtgacaggtgcctaaagacccaaaactccttgcctagtgttacctaatctcatgcataatgcaagggggaaacagtttaaagtaagtcaaattacattatagctgtcacttaatttttattaagacataattcaattaattaagctaacgcttttttcaaatgcttgaacaactgcattgggtgtatttaaacaacaagacaagacaaaagcaagagcaaccaaaccacctgcaactgagactttaccaccacagtagctccatgttgatttattacatgctttaataacaaaaaccatacagaagcatttatcaggttctttttatattcccacttgtgacaatccctacatttctgtcagagaacacagcaataaatatcagggtaggcacatatcacacttttgttttctaacatcagaatttatggtttatgccttagagaggtgctattctcctatgaaatcaaaacccttatgaaataacaggatggataccaactcagtggggttttttatcttgtttttttcacatttgtttttttcatgctattgtatgatgatgactgaaacagtgatggtttcctcctgatgagttcaagctcatgagatgcattgacaaaatctgattatgaacctgtttaggaacatgaccattaattacatctagcaagaaacccacccaagaaaaggatgatgtctttctttataaggagaacagtttgccattaagaaaaaaagacaaggagaattctgagaagaggacacagaaagatggatagggtactaaacattttctggtaagccaagaacatatggaaatacttagattaatataaatggcataataattaaaagagagctagccaataagaagcctgagccatcggccatacagtttataattaatagaagcctctgtgtgtttatttggattcaaatggctctaggacccagccagaacaggaacctccatcaagtcttaattttagtctatttatcaggctttacattgcctttcaggaagtcaaacttgtaaacatggggtatacctttgcagtaaaggcacattttttaaaaattctatgatgaagctgtataaaagcaagcatttatcatttgtcctgtggatgtcattctaggtattatataaaaataaactcttaattagcactaaattagaaagcttacattgatgtcactttgttgcctcactatctggcataatcatcaaacagggacctgctacaggaaaaccatattactggtttttaatgagacagttctccaaaacgtttgaagtataatgaaagaaatataatactagatgctaaaatatgatatcagcactactgattttgtatatttcttagaaatttctaagatttgagtggtgcccttgtttttaacagttgcagtaactgttgaatgcatttcacataaaagtatatacctctaaaaactcaccttttgcttattagttttttgtttgtctctaaagataaatttgtgttgttgctgtgttacttttgcctttacttctaaacttttctgtggccgtatctctgctcagagccacttcctgaaagcaggaagtctggtgaagctgctttcctcccaaatcatagcagctgactgtcgccaaacgatagaaaattttcttcccagaacactttttttctttcataaaaataaaaggatgcccacagagaagacaaaggtttaaagaatatgctctgcaggtatggaagccaaggaaactaaattcaggtgagtggtcagcaaaagaccttttctattgttaatgtttgcattgggactggcttctcaacccatacatttgctgtaatttaaaagaaaagaatgcagaatagacctcattctttatagaaacctttagaattggcaaactgccaggcacattctggccttccttcacagacatcaagttggtagtcatccaacaaaggaccaaaatgtaagctttcatccaacacacaaactgtcatctcccaaggagtctacgtacatagtcaaatatacaacactgaaattccagctaatttaaaacaaaatgctcagatttttgaacatatgaggaaaaataattttggcaagttatgtcaatttaattgagattagaaagatgagataaagagtcaacataatgttaaaattattggggtggccattttagtcaggttttatgatgaaagatagcatgtcagctatttctttgtgacttcttgcaattattcaactgaaatgcctaagaatgtccacactttatagtggtaattaataactatgagaataaaaacacacaaaacattacacacaaaaaacacccttatttatgattaaatagacacacctacactgatatatctgcatatattcacatgcacaaaaacacataagcacacatatacacaaacacacacacatacaccaaaaggaatacacacatatctatacacaaatatatgcatatgcacatacacacatatacacacggagatatatacacacaaagacctaaacatacacatatatctacctatatgtgcacatatatacacaagtgacccacacataaccacccagacaatcacatattcacatgcacatagacaaatacatgtatacacataaaacattgttgaagtacttttaaaatacaaggatttgtatatattttatgttagtaaatatactgtttatatttacttggacatcttcacacagattcttcataaatatttgtggttgcccaatacttctaaaagacaatatttgccaaaatctctagtttctttaacagttaaagcataattttagagtcatagtaaagttaggtgggatgtacagacctgtttctcatgccaccattttcacactcacacattagagtcagactcctagtcaaagaagtacagctgctacatctaaggagtctactttcatgtgtctccattgctgaagtccacagtttacactgagagtcattccttgcattttatattctatggactgataaacacatcctggcatatattcagctcatattatccagaagaaaaataacaacatagacatcaaaggaagtgattgctgcatcagaaggcaggaatatgtttatattcccaagagtctggcaaatttctccaaggtggctctgctattttacttcccatagtgagtattcttctggcttcacttccttgcccacacttttgtgttagtgttctaggatgttcattctaacaggcttagaagagtatatcacttccattgcatttaaagtatcttaactacccatgttgaacatatcattatgttattacatgattggcattatccatgtttctacttaatttctaattttaggttgtaaaatttgcaatttcctcatgtatttggaataataacagtatgtcttttaaagtacattctgcaagctctactaaagagatgtagtaatgaaaacaggttggtaatggcacaaaaacagacaggtagaccaatggaatctaattgaagaccatcatatggacccacacacttatgaatacctcatctttcacaaaaaaagctaaaactatacaatgcataaaagaaagcattttcaaaaaatggtcctgccataactgtatgacaacatgtagaggattgcaaatagatccatatctatcaacatgcacaaaacttatgtccaaatggatcaaagccttcagcataatccagccaaactgaacttcttaaaagagaaattgggaggtaaccttggatgaattcgtataggagaccacatcctgaacatagtgccagtagcacagatactaaaattgacaattaataaatgggacctcctgaaactgataagcttctgtaaggcaaaagacacagtcaactagactaaacagcaggccacagaatgggaaaaggtctttatcaagaccacatcagacagagggctgatctccaaactaagtagctagccaacaaaaaaccaaataatccaattaaaaattggggtatagagctaaacagagaattctcaatagaggaatcaaatatggctgaaagacacttatgaaattgctcaacatccttagccatcaggtaaatgaaaattaaaccaactctgagatattatcttacacctatcagaagggctaaagtaaaaaacaccaatgacagtttatgctggagaggatgtggagaaagaggaacactccactgctggtgggagtgccaacttgtacagccactttggaaatcattatggcagtttctccagaatatgagaacacgtgtacttcaatatctagcaattaggtatatacccaaaggatgcacattcatacaacaaagacatccattcaactgtgttcatggcaatattatttgcaatagccagaatctggctgcaacctagatgcctctcaacaagaatggatacagaaaatgtggtacatttacaaaatggagtactactctgagggggaaaaaaaacaatggaatcttgaaatttgcaagcaattaatggaactagaagaaaccaccctgagtgaggtaacccagtcacagaaagacaaatatggtatgtactcactcaaatgtggattttagacatagagcaaaggattactagcctacaatccacactgccagagaagttggaatacaaggaggaccctaagatagacatacctatttcccccatgaagtagaaagggacaagagtccctgaacaaatggggagaatgtgtgaaggagaaaggaagataggagaaagaggagggaagaactggagggggaggagaacatgagggatcagggagattgagtggggagtggaatagaagagagtaagaagagaaacacatcaatatagagagctgtagggagccgtccctgcattctccattacaagatggcgcctgcatctagcaggcaccgaatgtaaagttaatgcgcgcaggctctgggtaactttccattccttgatctctgcctatccccaggcactgaccatgtcacgtcttctgatgttcccacctaaaagctaaatctttgagctacagagagggccactcttccagggcatggccatagtatctagggacagctattagctgcctggtggaaagtagactatactgggctgctttttcatgagaagaccagaagtttgatctgttaggagcatgtaaaatatagatttatcttctttatatgatatgcttgcaatgctttagtcaacactcctactcaaggatgtccatgtagcctgcctgatctatggcaataatattacccatggtattttgtgtgaccaaggcctacaatttatagcaaaatcaataaagggttcaaagaagaattctgacaatacctaaagaacttccatgtagataggcagcacacttctacacttctacacagatgtccaacacacttccaaaaagatattcagcacacctcaacacagatgttcagcacacttctgtgcaaatgtgcaacacatttctgcaatgatgggaagcacatgtacaacacactggtgtgcatattctcagaacacttccccacagatgttcagcatacttctgtgcagatgtgctgcaaatttccatactgatgtgcagcaagcttctgtgcagatatgcaacacacttgtacacagatgtgtagcacacttctacacagattgtaacacacttcagacagttcattgataaaggctctttggttaggtggtactcatgtttactctccatcattatttgtcctggaaagccaatgaacataaccacaaatagtcagtacttcagtctgcacagaaaagacaaaatttattcatgtatttttaaaccgtcaccatgtgtctcaatttgtgctgaaaaaaatcactactttagcccaggctggcgttgaacttctcatagaattttgtttgaatgagaattggtataattatattataaagatgatgacaaatgatctaagtctatacttataaccctcaaggaccaggcattgtggaacgtgcccatcgcacacttaagtcttatttaatcaaaaactagactaaacagcaggccacagaatgggaaaaggtctttatcaagaccacatcagacagagggctgatctccaaactaagtagctagccaacaaaaaaccaaataatccaattaaaaattggggtatagagctaaacagagaattctcaatagaggaatcaaatatggctgaaagacacttatgaaattgctcaacatccttagccatcaggtaaatgaaaattaaaccaactctgagatattatcttacacctatcagaagggctaaagtaaaaaacaccaatgacagtttatgctggagaggatgtggagaaagaggaacactccactgctggtgggagtgccaacttgtacagccactttggaaatcattatggcagtttctccagaatatgagaacacgtgtacttcaatatctagcaattaggtatatacccaaaggatgcacattcatacaacaaagacatccattcaactgtgttcatggcaatattatttgcaatagccagaatctggctgcaacctagatgcctctcaacaagaatggatacagaaaatgtggtacatttacaaaatggagtactactctgagggggaaaaaaaacaatggaatcttgaaatttgcaagcaattaatggaactagaagaaaccaccctgagtgaggtaacccagtcacagaaagacccagacagctcttgcacacccggagtagggtagagtgcctggcttgagcagcccatgagagatgtcaagcaaggcatcgcacagagagttgcccagtatgcaggcttctcttggaatacaaggaggaccctaagatagacatacctatttcccccatgaagtagaaagggacaagagtccctgaacaaatggggagaatgtgtgaaggagaaaggaagataggagaaagaggagggaagaactggagggggaggagaacatgagggatcagggagattgagtggggagtggaatagaagagagtaagaagagaaacacatcaatatagagagctgtagggagccgtccctgcattctccattacaagatggcgcctgcatctagcaggcaccgaatgtaaagttaatgcgcgcaggctctgggtaactttccattccttgatctctgcctatccccaggcactgaccatgtcacgtcttctgatgttcccacctaaaagcttacgtccaaggcggcggttgccagcctttattatgggacgggattcttggctcggggtctccgcttttgtaagcttatgctcttctctctcaagacgcataaagctttactgcagacggatccgagtgtcctgtgttgttcttgctggcaagatgatcacgcgggacgtctggtgctgaaacccaggaacttgttaacatcgccggcaccgtggagacccctcggacgagagccactatagaattacagagaaatctggcactaggaaattatagagaaatcaacaaggatgtccccaactagaatcctcagcaatagtggagagactgtcttaaatccctgccccctatattgagaatgatgactaccttaaatgccatcctagagccttcatctggtagcttatggaagcagaggtagagatccacagccaagcactgaagcaaactcctggaatctagttgcagagagggaggagtcaagactagcctggagaaacccatagaaacacctgacctgaacaagcaggagctaatgaacccaagtctgtcagccatggaaccaacatagctccaaaccaggccccctgaacatgggtgtcagctaggagcaatggggcctctgacagtgtaaccaagatgtatcccctagtgcagaatgaacttagggagcccttttcctatggggggacacttccttaatctagataaacagcctaggccctcccgcaaatgacttaacagactttgatgatcccccatgggagggaggtctcaccctccctggggagtggatgggggaagggatgggggtcttggttgggggcatgggaggatgggaatgagagggaactgggattgatatgtaaaataagattgtttctaatagaaataaaatctaaaacaataccaaaaatgaaacaattcattttccatattcatttcttgattttgttgatatttaagtttttgtttatttgttttatttttcactctgcattgccatttgcagagcagaagttataaatttaaagcaacacacaccagtgattatttgtttcatagggcacatctttggaattatacctaagtgtccttgccatgaaggtcaccttactgcttaccaagttaatattcatcaaattgtattgtgttgtaagttccatagaggcctcagactcatttttactttcattgaataatgctatatgtgtacttatagaaggccctggttaaattttgttacttgcaaaacaaaacaaaaagacatcagcacaggaaaggctgtgctgtagggatgatggtaggctgacagaggttggagggagatgagtaacaggagatgtgggaataatcagaatgcattgtatacacatatgaaattgtcaaagaaaatattttattaataaaaaatctgcaaagtgagtgtcacagtaaaacatttttttttcaaaatcattccaaagttttgacctaatttcacaactattgatttattgctattaagaatggaatcattgtttccttctgcccaaggggtaatctgagcaaacagattgattgcaggatacatgtcatagtctgcatggcccgagatatcatcaacctgaatcacatttctgtctaagaaatctcatattagaaaaagtatggattattggtttgatcattaatataggtgaatagaatgtaataatgcataaggccttcaacaatgaagtaaactgcaatgtaaatacatctcaatttctgatgtgtctggagtcaaataatttttgaaaagatcacaagaataaatgataaagtcaatgaaaagtgtaatacttcataactgttaagtaatgctgaaagaaaacaaaaacctgaccaaatattctgttaagggtgctgggaaaggctcgttcattcattttaagtagtattgaaaactggtactgttactatggagcacagtatggagaatcatcaaaagactaacagaagagctaacatatgctgtggctgtatcctccttgttatgtgcctaaaaaacttgctgtcctattctgagcacttgctcagccacgtgttcattgctcttctactcacaataactaagaaatggaaactaccaaaatgtccttcaacagataatgacaatctggtacatatgcattatggaatatcactcagctgtaaataaaaatttaattatggaatttgctagtaaatccatggtaagaaataaatggttaaatgtagccacatttgctacccaacatttaattttcgctgggaagactatagtataattggcatcccagtacaagatgacattagataccatttgtcagagcagtctcagggtagatggagaaattttgctttcttgtcttaaatttttggaaagcattccttggcttggatttgatggaaaagtgtgtccttcactgtgttatttttagccctcctcctgtttgtaatgtaggaaagcaaagaaaaattctatgttatttaccccataattatgggttatttggcatagatctaaagtcagataactaaccaaataaaatgtataagtacatataaataaatcttagcttcagggtaactattcatcaacaaactctattattacaataataaaaaataacagaaaattgtgaaaagtataaaaatcattgttaaaaataaagcattgtcaattaaataattttgtaagactgagtttggtatgggatatttcatttttcactagatgttttgttcacacagtgaaaaggctcaattataagtgaatgtagtattatattctatctatgtcactttaattcagaaatgaaaggaaaaatatcagaaacatttgtgtcatatacaaaagcccacacacaggcacattacaaaattcctaattattttctagaaattcagtcttcttactcttgttctgaagcacttatgatcacacttccctgattatagttttagagaataactagaaattaagagtgccaaacacagggtggtgtttaaatggaaatgagaaatggcatcaaacacagaaggaaacacaaatctgtcactaacacacatcaaaacatctgattagttggaggaggtaaccaccatatggcagagtattaataaatgtttaatcacagtaagaactgaaagaatagtagcaacaaataacaataattaaactaatctactattgcctgaaccatctaccctaaaattagtggaaacccacttacataaaatagctataaagggcatgtggaaatatcagaattcttgagagacagccacttagaaagtagttattaaatattttattctaatacattgttattgttttctaaattatatgttttgatttgaaaacaattctttatagaatgacaaatagctgtactgaagtttttaaattttaatttccctgggccattggaattctatataatgccagccctcagcactagtgatctaattactctgtgccttcatgttgaagccattttgcaggaaagagcagagtttaatgtagtgcagctacagaaaaaagaagtcgggctggagggcatctgccacgggcataggctccgctcttgtcccggagtgcgcagaactgggagcagcttggctatggccatagccatgctcttgtccaagaggtactccgtgtggaagtccttttgtgcaattttgatgcttttctgcagaactgtgatctccaacccaacagttttagagcctatctactggaattcctccaactccaggtgtgaacctagcaagttggctggatcccactgaagcctaacatggattgattgtcacaactatgcatccagaaacacagattcccttgccagaaccaatgagaaggttgtagcactggacattatgacaattggaggacccacaggtgcaactaagatttgggaaataagggtagacactgaaggatcaaccgggaagacttgccagcattaaggatcatgatgtgaaccctttgacctcggattttggaagtttgtatacaaggctgcttcacaataaaagtgacgaacattctctcagaaacagaaccagacatcttgtggttcatccaaatctccaggcttctgcctgatactcggacttagtggtggccaagaatagtcacaaattgaggtcccactgagaacaggaatgaaatgggaccctgagagatcaccctcagaattctggcaagcaaataaggatttgtgagggtggattgcaaaaggtactggaaaataggtacctcaactccttagagagtttgattggtatagagatcactgtcaatcacacagagaaagtttaaagagacaaggtactggtaagatttcattttaacattggatgaagcaataatgctaagaaaattattaaagaaatctgggaaatctgcctctgaggaatccctcctccatgaactgctccagtcagacgaaactgatgtggtgtgcacaggctggctggagaaatcaattcctgagaaaaagttggggcactatgcttggaagaaattctggttcatcctgtggagcggtaagatgtgtggtgacccagatgttctagaatactataaaaatgaacactgcaagaaacccctgtacgcagttggatgtagccttgactttcaacaaacaagagctccaaaagaggttcatgtttgatatcattatcaatgagcacaccttttacctggtggctgagacagaggctgacagaaataggtgggtccagagcatctgccagatctgcggcttcagtcaaactaaagagagcactgacaccttgagaaacctttctttagtcagtcataatctctgctcttctccagctgaattcagcagctccagtcagcccctgctccgagcagggtctacggcagatagtgaggatgtgtacacggtcaaggcacccagaaacaccctgtgtaaggaatttggagacctcccagtggactcagccataccacccccaccgcaccccaagacactttgcaggggcagccctcaacaaagacctccagtcagtgactacaagtatcgaacacgaggtgaagaaactgcctgcttgtctgataaatcactagaaaagtctatcgtgggtcaatcagacagtgccagctctgattgcaattatacgcccataaacccaggttctgacatcccgatgagcacaatgcctcatcactttaccagccgaagaagtgagatcctcaagcttggcagaaaagcaaagtcagtaccccttgacctgagtaacaacactgtcatcaatgagctcactttcaaatcatttgtcaccaagtcttggtccacattcaaccacacctttaacccaaggtcctccaagtactgcttttgggtctcccatacagactctggagacagtgaggagaactgtgtccctgtgcagaccccaatgtcttcatctcctgtacccagtgtcactaacaacccagctccaaaaaagagtactggcagtgccaattacatagccttgcacttccaggcgctctccccgagacctcatcacaagctatccacatcattgtcatatcagatgagaaaggagaatatgtccaaatagataaagaatagacctaagcaagctccagtcaggccctgctccgagcagggtcagtggtagacagtgaggatgtgtacatgttcacagcacccagaaacaccctgtgtggggaatttggaaacctccacgtggactcagccttagttgccccaccacacccnnnnnnnnnnnnnnnnnnnnnnnnnnnnnnnnnnnnnnnnnnnnnnnnnnnnnnnnnnnnnnnnnnnnnnnnnnnnnnnnnnnnnnnnnnnnnnnnnnnnnnnnnnnnnnnnnnnnnnnnnnnnnnnnnnnnnnnnnnnnnnnnnnnnnnnnnnnnnnnnnnnnnnnnnnnnnnnnnnnnnnnnnnnnnnnnnnnnnnnnnnnnnnnnnnnnnnnnnnnnnnnnnnnnnnnnnnnnnnnnnnnnnnnnnnnnnnnnnnnnnnnnnnnnnnnnnnnnnnnnnnnnnnnnnnnnnnnnnnnnnnnnnnnnnnnnnnnnnnnnnnnnnnnnnnnnnnnnnnnnnnnnnnnnnnnnnnnnnnnnnnnnnnnnnnnnnnnnnnnnnnnnnnnnnnnnnnnnnnnnnnnnnnnnnnnnnnnnnnnnnnnnnnnnnnnnnnnnnnnnnnnnnnnnnnnnnnnnnnnnnnnnnnnnnnnnnnnnnnnnnnnnnnnnnnnnnnnnnnnnnnnnnnnnnnnnnnnnnnnnnnnnnnnnnnnnnnnnnnnnnnnnnnnnnnnnnnngagacctcaccacaagccatccacatcattgtcacaccagatgagaaaggagaatatgaccaaatagataaagaacagacccaatccccacaaaagtccatacaggaatggacaaagatgcgacagtcctgaagatcctccaaagatgccaagctatggtaaggatggccatccttcaacatctactctcctttgtgagtttttttcaaaggatgtatgtatgttctgtatgcatagtgtggccacatgtgtgaatttgaagtgtaatcgtaattgtgtaactgttaacaaaagaatgctattgtgttgtctttaaatcatttaattactagggaaggagcctcagttattaaagtacaggttacatggaaaaattttctgctgtttttccatggagggtgaaaagctgtggattctttccatactggtatggtttcatggggcaggaccccatgaagcagtggctcaggtgatccttatatttgttttccttaaaatttaatcagttagaaatggtagtggtcacacccaatcactttttaaaggaaaaaagaggaataggatagagaaatgataattgtattgaaatgaatccccatttgttgatactttgtattggaatggatcttcatttgttgatattaattaggttttctagatatatagatannnnnnnnnnnnnnnnnnnnnnnnnnnnnnnnnnnnnnnnnnnnnnnnnnnnnnnnnnnnnnnnnnnnnnnnnnnnnnnnnnnnnnnnnnnnnnnnnnnnnnnnnnnnnnnnnnnnnnnnnnnnnnnnnnnnnnnnnnnnnnnnnnnnnnnnnnnnnnnnnnnnnnnnnnnnnnaaaaaaaaaaaaaaagaaaaaaaaagaaaaaagaagtcaatattaccaaactaaataagcaattctcagctcttggataaggtagtgttcaaaaccacaagtttcgatatgtgaaacacaggggctgctgaggcctgcaagggtgtgtcccaggaacacacatgcccctggtgagggtgtataataggaacacataaactcctggtgagagtgtatgacagagttccgtgcacactggttattaccaaatgttgaaagaccaaattaccgagagtcacatgtaagtagagatacactcttctttttggtttttcgagacagagtttctctgtgtatctttggagcctatcctggcactcagtctggagaccaggctggccttgaactcacagatatcagcctgcctctgcctccggagtgctgggattaaagatgtgtgtcaccaatgccctgctaagagatacactcttaacaaatagattttctgctgcttaaatgtcccacagtatttcaagtgcttatagtgtaaatgctcattctcaaaacatagttcaaagaactttatattgggtactaattaaaaactctagagatattgcacttaacattttactagaattgctttcctcggacagctatttgtctgagtgtctatctatcagtcattcttgtttttgataagtctcaatggaaagtacttaaattagcatttttcttcttaaacttttagagaccagattttattgcctatggtgttgttttgttcacttaattttttttctgtttgtgattttgtatccagtacaaatataagataaaatcatttactaaacttgcttaaagtgaaatgtctgtgctctaacaattacatatgttcatggtgatgtttttctttgttaaatattgcattatttacaacaaactttgcacctgaatactatgagggtttagtttcaatgacttactgtgcttttaaatagtttatatgaatagatttattaaaattttctatggataagaacttacttgactccagaaaaaaatattacatatctatatagtttttatatctttagatatttctcatcattcttctttagattttcatagatgagtataatattttgttcatagttactactttgtcctgcaactctttctatgtcttcaaattcttcttttttgttttatatccattgttactctttaaaaaatgtttccatattttataacccttctgcaattacccctccctactacctgctatctgctgctttcctccctaatttctattcagaaaatggcaggcctcccatggaaatcaacaaaacataacttatcaagttatagtaagaataagtacctcctgcaaatattaagcttgggcaaggcaacccaatatgtggaacagggtcccaaaagccaccaaaagtgtaaaagacaacaccctgctcccactgttaggagtcccacaagaagatcaaactatgcaactgtcacatataggcagaggccttaggtcagtcccatgcaggctccctgtttgtcagttcagtctctgtgagctctgattgtgtgggttttcttgtgatgcactttgcccctctgattcttataatccttcatccctctcttcattagtattccaccagcactatctaacatttggctgtgggtctttgcatctgcttccttaagatgctggataaaacctctctagtgacacttggactaggtaccaatctatgaatagagcagaatatcattaggcatcattacattgacattcttgattctatcctagttctttaggcaatccagtgtctgtaggcagtttcaggggagggctcacttgtgacatgggtctgaacctggaaccatcattgtttggccagtcacacaatctcagttctatccttaaacctgaatatcacataagcaggacagaatgcagcttggaggttatatggttaggttgatgtcccaatccctttactgatagtcttgcctggtcacagaagattgctagtacaggctatttcttggagtctttgccttggtcacccttgtaggttcctgtgagttttccttgcactaagtttctatctgatcctgaaatgccccaccctttccaggtttgtctttcggtattctccctaacaatccctttaccaccttatttcccattcccacaagctcccagtccacccaagaagatccaagtgtaccagctttgagccctccttattacctagattctctgggtttgtgcattatagtctggttagcctttacataagagttaatgtctatttacaggtgagtacagaccatgtttgtctttctgtgtctggatttcctcactcaaggtaatttttttttagttccatccatttgctttcatattttttgatgtgattgtttaacagctcagtaatacttccttgtgtaaatatagttacttttctctatcccttcttccattgaggagcatctgggctgtttgcaggttttgaggttacaaataaagtggctatgaacatagttaagcaagtgtttttgtggtatgatggagcatcctttgggtatatgccaaagaatgttatagctggtcttgaagtagattgattcccaattttctaagaaactgccatattgctatccaatgttgctatacaattttgcactcccaacagcaatggaggagtgtgtcccttggtccatattctctccagtgtaagctgtcatttgtgcttttcattttaccaatactgacagaagaatagaagaatcttagtgtagtttttatttgcatttcactgatggctaaagatgtgaaacatttatttaagtttcctgcccatttgtgattctacttttgagaattctgtttagacctgtaccctattttcaaattacattatttggtttcttgacgcctagtttcttgagctctttatgcttttgggaaatcaaccatgtcagatgaaggtttggagaagatattttcccattctgtagcctgccattttcttctactgaaggtgtcatttatgttcagaagcttttcagtttcatgaggttccatttattaattgttaatcttagtgcccgcactactgatattctgttcatgaaggtgtctcctgtgccaatgaattcaaggctactttatactttcactttcactcggttcagtgttttggttttattttgaggtctttgacccacttggacttgagttttgtgcagggtgatagatatgtatctatttgcattcttctacatgccagcatacagttagatgagctcaattcattgaaaatgctttcgtttttctattgtagaattttagcttctttgttgaatatcaggtatccataggtttgtggacttacatttgggtgttctattcaataccatttatctacttgttttgttttatacatcaccatgtgatttttattgctatatctctgtagtaaagcttgaaatcagggatggtgatacctctggaagtttatttttttctttatttttttgtacaggaatttttttagcactcctgtacttttctgtttttccatttaaaatgagtattgttctttcaaggtttgtaaagaaatgtgttggaattttaatgggtattttattgactttttagattgattttcataatatggacatttttactatggtaaccctactgacccatgagttaggcgatctttccatttatgatatattcttgatttttttcttcaaagtcttgaagttcttgccacacaggtcttttatttgcttggttacagtcacaccaagatatttcatattatttgtggctattgtgaaaggtatttctcagcccatttgtcatttttaaataggaactttattgattttgtttcagttactcttgtatctagccatatcactaaagatatttatcagctgtagagcatctctgcaagaatttttgggtcacttgtgtatactattgtatcatctagaataatgatttttttttttacttcttcctttccaatatgtataccgttgatctcctttggttgtcttatcattccatctagaacaccaaatgcatattgaatagatatgtagagagtggacagccttatcatgttcctgattttagtttaattgctttgtgtttctctatacttaacttgatgttggctataggcttgctatgtattatttttaatatgtttaggtgtgtcccttacttaccttttatctccaggacttttattacaaagtggtgttagattttgtcaaaggctttttaagcatttaatgagatgatcatgttttttttttttctttcagtttgtttttatggtggattatattgacagattttgtatgttgaaccatcctggatctctggataaagccttcttgatggtgttggatgatttttttgatgtgttcttggattcagtttgcaagtattttattgagtatttttgcatcaatgttcatgaaaaaaatggatctgtaattccttttcgttttggagtctttgtgttatttgtatatcatggtgactttagcctcataaaaagaatttggcgatgttccatctgttcctattttgtggaaaattttaggagtattggtaatagctcttctctgaaagtctgttagatttctgtgttaaaactgtctgatcctgggctttttgttggggggaggtgactttcaataactgctttatttccttaggggtcatagttgcttaaaggaacttgattaaattttggtaagttgtatctatcaagaaatttttccatttattttagattatgtaactttgtagagtacaaatttttgaataagacctattgattctctagatttccttagtgtctgttgttatatctaccattttgcttgtggttttcttaatttggagtattcgctctgtcttttagttactttggataaaggtttgtccatcttgtttactttctcaaagaatgaactcatttcattgcattttttgtattgttctgtttctattttattgatttcagccttcagtttgtttatttcctgcctattcctcctcctaggtgtgtttgcttctttttgttttagaggcttgaggtgtgctgttaaatcactagtatgagataactttaaatactttgtttgtttgtttgattttagttttctgagacagggtttctctgtgtagctttggagcctgtcctggaactagcttttgtagaccaggattgtcttgaactcacagagatctgctttcctctgccttccaagtactgggattaaaggtgtgtgccactgtaggggataccctaagcacaccacttggggctggttacaggtaatgctagtcatgctcgcttggagacaggtgtccctgaccacacccacatgggtgtggtcaggggacatgaagaaggtttaagagtgagggacatgcagtaggggtcccttctacttaccttgcactctgctgactgtctaggctgatctgagtgaatagcattttcctaaataatatctagacctgactccatattgccatttcctcttcatgccaccattgcccagatgctgcaaattctttttgaaggacttagtgctatgaactttccccttagcaccatattctttgttttccatgagcatgagtatgttttgcattcattttcattgaattctaggaagtccttaatttctttatttcttcctcttcaattggtaatttagtagagagttattcaccttccatgatattgtagactttctgttatttctgttattgctgaaatccatctttaatcaatagtggtctgataggtttcatgtaattaattcagttttcatgtgtctattaagagttgctttgtgagtgagtatgtggtcagttttggagaatgttccatgaagttctgagaagaaagtgcataatttggtgtttcagtgatatgttcttaagtaggtatctataattccatttgaatcacaaaatctgttaacttcagtacttgtttgtttagtttctgtctggacaactgtccattggtgataatagggtatgtaacccctccaacccattatccatgtgtgagaatcaatgtgtgatttaaactttagttgtgttatataaggtagtcatcaatctcataattggagaaggccatttcaggtacctatcgactattgcttagattgttagttaaggtcaaccttgtagatctctgtactgatagcttggaaaccatcataggactgaaggaagaagtcagtttggaggtctggacaatctatggggccactggtaatgcatcagtatttaccccgagtacacagatgaactttgggagccctctccacatagagagacacacaggggagggtcttagccctgctgcaaatgctctgacagatttttaagatcccccatggaaggcctcaccctccctggggaccagaaagactttgggatagagggttgtggggggcaggggaggatgggagggagagggatcttagattgacatgtaaaagaagcttctttctaatttaaataaaaaaaggaaaatataaactttagtagtgtttcctttaaaaatgtgagtatcaatattgctgatgcttgtatttatagttcctgattgctaatttcccatttcctgaattcctaaagtttgtgttttctttattgcttctattttcattttagtgtcttaagcagttttaatttttgtgtcaaatgtttgtcttttcttaattttcttgacactcattaagagttttattgattttctccatttttaattgtcttttccttgattactttaagaaatttcctccttaaacacctgtaatcatcatcataaagttgattttaaggtcattttcttgtgctttagctatgttggaatactcagtgcttacttttatggggagtctggcctcctgtggtgacatattgcctttgctattattgtttgtattcttacatttattttaggcatctgaatttggagtgattataggcctgtggatttggggatttgtctttgttgcctgggtgatttttccctttgtttatgctttctctctggtcttttagctgccataggccatttttgggtagaggatctcaacattagggtcatccatggcctggatgacttctggtcctgcaaggggttgttgcctaagtttggggctgaagttctggctatgtgtgtagtgtctgaacaggctgggtttcttctgggtttaagatcctgacctggattctgatagggtctgaggcttctgcctgattttcagggagttaccctggtctctatattccggatactggcctggcctctgttagagtgaaaggcttccacctgaggagttggtcaggatcagatgacaagagagaaatatctgcctctaaaattcaggttctatcatctctctatctatatatttatttatctatctatctatttatctatatctatctgtcatctatctatgtgtgtttatgtgtatatttgtattcactttcaatgtgtatatatttgtatatatttatatgtacatactttttatatgtatatttatatctatacatacatattttatatgtacataatatataaataaaatatgaaaatatatatacaaatatgtatccttatatacatataaatagacatttaaaatcatgttctctttcagtgtgtgtgtgtgtgtgtgtgtgtgtgtgcatgtatactgttgcttgtatgagataattgtagctgcagaatctcagaacatgagctagaaaatacactaaccatagggcatacagcagtgattcttaacctgtaggtcatgacttctttattgaccctctcacaggggtctactaaggtctcagaaaatgcagatatttagattgagattcatagcagtagcaaaattggcatgaagtagcaatgaaataattttatggttgagggtcatcacaacacgagaaactgtgttgtaaggttgcagcattggtaaggttgagaaccattagcatagaagaaataaatctcttgctcactgaagtttaagaaaccatttctttaattaatagattctttctttctttctttagaaacaatcattttacatatcaatccccctgtccctctccatcccatcctcccatgtcccctagcaaaccccccaacccatgccacaccttctctccaaggacatcagcaaagtctgtcatatcatttaggggagggcctaggctctcctccatatatctggactgaaatagtatccctccatagggaatgggctcccaaagtctatttgtgtgctagcggtcaatactggatccattgttagaggtcccatagccttaccaggcctcctaactggcacccagattcagagggtttggtgcagtccaaagctggttccccagctttaagactgaggtccttttgctctcactagttcaggtagctggttctaaaagtttctccagcacagtcttgactcttctgctcatcagtcccccctctttacagctggaatccaggagttgggcttagtgcttaggtgtggatctctgcttctgcttccatcagctactggatgaaggctctaggatgacatttaaggtaggcatcattctcattataggggaaggatatttaaggtagcctctccactattgcttaggatgctagttgggatcatccttgtggatctctgtacaattccctactgccagatatctctttaaacctataatgcctacatctattaatgtgtctcttttgttgttaacctctattcctctacccacacaatcttcctgatccttcatgttctcttctccaattcttctcctcctctcctctttctcctaccttcctccctccttcccatatgttcctattacttccggggttcttgtcttttctacttcacttggggaccctatatgtctcttttatgggcctccttgtttccttgtttctctggaagtatggattgtagggtgattatcctttgctctacttctcatataagcatatgagtgagtacataccatgtttgtctttctgtgactggggtacctcacttagtatggtttcttctaattaaatccatttgccagcaaatttcaagatttcattgttttttttttccaatgagtagttttccattgtgtaaatttaccacattttgtatccattctttagttgagggatatataggttgcttcaaggttcttgctatcacaaataatgctgctatgaacacagctgaacgtatgtgcttgctgtttgaatgtgcattctttgagtatatgccttagagtggaattcccagatcatgagttagactggttccaatttttcagagaaacctccacactgatttcaaaactggctttacaagtttgcactcccatcagcaatggagaagctttcccccttctctatatcctctccagcataaaccgtaattggtgtttttgattttagcagttctaaggggtataagatgttatatcagagctgttttgacttgcatttccctgatacctaaggatgttgaacaatttcttaagtgcctttcagccactttttgattcctctactgagaattctctgtttaggtctgtaccccacttttaaattgaattatttggtgttttggtgattagattcttgaattctttgtgtatttttgataagcccgctgtctgatgtggtcttggtgaaaattttttcccattctgtgggctgccattttgtcttgttgactgtgttctttgacatacagaagcttatcagtttcaggaggtcctatttattaattgtggatctcagtgtctgtgctactggtgatatgttcaggaagtagtctcctgtgcaaatttgttaaagggtatttcccactttctcttctaataagatcaatgtgtctggatttattttgaggtctttgatccatttggacttaagttttaatcatggtgatagatattgatctatctgaaatcttttacatgttcacatccagttatgtcagcaccatgtctacccgtttatttttgtgccaataccaagctgtttgcattactatagctcaatagtacagcttgaatcagggatggtaatgcctctgaaagttcctttattatacagggttggctatcttgtgtcatttgtttttccatataaagatgagtatatcctttccaggtctgtgaagaattgtgctgagattttgatggggattacactgaatctctagattgcttttggtaagattgccatttttactatgttgatcctacctatccaagagcatgggaaatatttccattttctttaaagggtcaaagttattgctttgacaggtctttcatttgtttgcctagttttaccccaagatattttaatttgtttgtggatattttaaagggtgatgtttctgtgatttatttctcagctcctttattgtctctatacagtagggctactgatatttttgagtaaatcttgtatcctgccactttgctgaaggtgtttattagctgttgtagttcccaatgaattgtaggaagtcttagaatgttttcattatttattcctttacccaggagtgatgcagttgaacattgatctatctgcaatttgtgttattattgaattctcattttaatctgtgggggtcatataagatactgagcattatatcaatttttttcatatctgttgaggtttgctttattggtaagtgtgtggtggattttagagacaattccatgttgtgctgagaagttatattctttgggtttggattgaatgttctatagatgtctcttaaacccaattgggtcaataatttctgttagttcctttgtttctttgttaagtttctgttaggtagtccttctttgctttctttaagagattgttgatttcttgcattttttttttgttttttcttccatttctttaagggattttctctcatcctttgaggttctctatcactttcatgaatttgtttttaaggccattctcttatgcttcctctgcattgggatgtccaggtcttggtggtgtagaatccctagactctggtggtggcttggcttgtaagtctttctgttgttctatgtgtgaaaggtgagcttgttggtttaagataactttattcagaaaaataccagccaaatgcaagccagagcatgcctaggggcagcaaggaatggaggccagagagaaggggaagcagacggggaaaagagactcccatgtgcccgtggtcccttaagagcccatgcggagtcatcctgacctcaccttgaacacgccttgataggtgtggtcaggcacacctgtagccagcacttaggaggcatggttacagtgtctccctacaattccccttttagtctaaaacaggattaaaacttaacagtgtaaagtatccagaattaacaatcataaaggtgaaatacaagaaatctgctattgaacattctaaccatgtctattccagctaaaccctaaagtcatctgaaagaggtgtccaaatatgaacacctccttccaatctcaaccctaaacaataggaaggtcattcctaactaggcttaaactattctaatagacaataatggtaatggggacattattgtctaatagacaataatggtaatggtaataatagcatcctccaagttactttctgctgaaatgggacaatggtagccttttggggtcctgtgggggaaaatgttattatagtgaaagtctctaatggattatatccagtccaggttagatgggatttgttggattgaagatctaggttgaaaccctcaaattgattgaagtcagtacttagaagctctggtctgagtactagtagaaaaggaataagttggatccagtgcaatctaggagtatggcccaattcattttccagagtatccagggattattttcaggcaggtcttcattggctgtttgggactcaaacataagtgttagcagagaaatatttgcttatatatgtatgtatgctggaaaaggcattcatggaaaataatgattgtgagatggtgtacaccttgaaggaaagagccaagaaagacaaagacagtccctaaattcctctcttgttctgtattatatcaattggctctttgatatattacagaaattctaaaatttagttaaacaacgtgcttggattttagggaatgaaagccaagacctacactaaatccagaattgatttacttgaataggaaataaggagaaaaagaattatttgagagacagatgtaaagtttactgtatggcatgttccttatgtttgatggttatagctaccttctcttcttaagcatctacccatgtagagttcttggacttctagagatgagtttccctgtgaagatagaaagaaagcacttccctttcctttgggaggtatttatttagtttatgatatatacctcattaaatatctgtcattcgtccttgtcgaggggtttgtcttttacaactcgaatcttgatcaactttgatggtatctaaagtgtttcttctcctgtggaaacaaatgaaaaacccctaccccaacttaacacatgtccaggcttccataccaaggtcaggacattttttaattatactggttgatttagttcagcagttttttccatagtacagtgtctttctgcagctgtctgttctttgtcattggcaataagaaagtttagtgtcaataaagcattatgcaacctatgtttgggttttttgtttttacttaccagcttgtctatggagcatctccttaagtgttctgttggatctctcaacgactgcttgtcctgaatgattgggtggtataccagtgacatgctttatgttataatatttgaagaactcttccatttttgtggagacatatgcctaagcattgtcagtttttatctgtgcaggtatatccataactgccatcacctctagcaggtgtgtaataacaaaatcagctttttcagagttgtgagcagtagccgattgcaaatctgagaatgtgtctgtagtatgatgcacatgtttcaaatttccaaattctgtaaagtgaaagacatccatctgccagatctcattcctgtgaatgcttttaggataacagccttctggcagtggaatttggttataaaaggaacaagtaggacagtttctccctatctccttggcttgttgccgagtgatggagaagtcctttttaaaacctttgctatttacatgattttttaataaaattctgagacttctagcacactaccaattaacaaacaatcagtctcgtcgttgccttgtgctattgggcttagcagatatatgtaatgtatagaggattgcttctgtttctgattgtttcctgtaattgtaaaaacaacaaggttaattccgtattatcaggaatgaattctgcagtctctatgtgtaaggtgactcactctctgcatattgggaaacagtaactatgttaagaggttctgaaaaatccataagcaccatgagaattgcatataattctgccttctgtatagatgtatacagactttgaactactttttacctcacctgctttataacctgcctgacctgatttgttggcatcagtgtaaaaggtaagaactccagaaatgggtgtttgtcttacaatatgtggaaaaatccagactgattttttatgaatttaattttgtcagttttgggatagttgttgctaatcgttcccaaaaaattagtaagatctatttgccaatattaattatacttccataaggaggaaatttcctcattagttaagggtactgtaatttcacctggatcttttccagtcagttgacagaggcttaatttgccatttagaatcaaatcagaaatcttttctatacatgtctttaactttttattctgttcatgtggcagaaatatccactccaatatggtgtctttcctctgcatcagaattccaggaggatattctctggatggcaagataaccagaatacagtctaaatcaaggtttatccaatctacatgtgcatccaatatcctgttttctacccattgtaaccctttctctgactcagcagatactattctcagactgtttaggtccttatcacctttaagggccatttttaaatgctttaagacatgtccttctaccccagtaatcgtctgtaattgagaaattttcccttgcagcttctgaagactattaagagtttgataacaaacccttataatttgtacattttgaggtttgattctttgtaagcctatcttgtaaccgaaatagttaatagaatctcctctttgtatttttctggggcaatctgtaacacccttctaggcagaacttccttcaccatttccaatatacattccaaagtctctttattagaatctgataaaagaatgtcatccatgtaatgataatttcttacgaattacttccataattctgtacatagtgttgacacaaagtaggactatttagcattccttgtggcaaaaccctccattgatatctcctaactgcctgtgaattattaagagttggtagagaaaatgcattttttctctatcattttcctgtaatggtattgtgggaaaacagtcttttagatcaatgactatgataggccatcatttaggtatcaaggaaggcaaaggcattccaggttatagagagccctttggttgaattaacttatttgtggatctcaggtctgtcagcattctccacttatctgacttctttttgataacaaatacaggagaattccaagggctggtagattcctctatgtgtccagcctatagctgttcctgtactaacatttctaaagcctctagcttctcagaggtcataggccattgtcctacccaaacaggtttgtctgtaagccacttcaattgcagcgcctttggctcctctgaaggtccatcatttgtacctagtttctgtacagcatggatggttggtaaccattttccatagcatcttaccagaccttttctactatctaatgattgtacataatttgtatctgacaccggaggaatattaatctgagtattccattgctgtaaaagataatgaccccaaagatttatagctatatctcccacgtatgttttctgtctccctttctgtccttccattccaatgcagaacaccgagtgaacactctgtcaatctctagatagagttccaattcctaaaaattgtacatttgcctctctaagaggtcatttctgaggccaagacttttgggtaataatagtcacagccaccccagtgtctactaagccagtaataactttttattaattttcactttcaactgagtccttttatcattaatagaagtttgccaaaatatgcttctctcattttctccagtcacatttgtttcttcatcactattcaatctgccatctagagcagtatcatttttcacaataggcaaagaactatccattcgtcctgtgagagattgtcttccatgaccttttgtgatatgtgggacttcttgagtcccctctaggggtttctcagccttaccaggtttccttgaatgtccctggtcgatctacattcattggtccagtgtctgctcttaccacatcttctacacaatccagaaggcagtggctttccatatgaagcattgttagaatttgtttatctacagtttctctttgtataacccattctaccacagctgcaacatcaaggttcctggagccttcgtggtctcatggctcttcctatacaaggttctggttcatagtattagtaacttctagcctcttggtacctattttgacatgtgtaagttgcttctccttcccaagatcttgtgtcctcacctgtagaacttttaatctcctgttgcctttttaaaccttttgagatggcttcacctatcaagctccagcatcttgcacactgtagtcagtgttggctgcatgcaaaacccattcttctaggggagctgatctgatctttaaaggcagaaatattcttttgcattttgggcttgcattttcataagctattgtatatataattgatagtcttttttctggatctgttatccgaaattctactgccctagttaacctttgtaagaagtcctggaactgttctgtaggtccctgttctattctggtataagcttctaggcgttctcctggctcacgaaccttatcccaggtttttaatgctgctttcctgcataaagatagtatatggtcatcatattcagcctgagcctgtgggttagcataaataccctcactaagattcttatctagtggggctacaaaaccttcctttatgccttgacactcaatgcggttcacttcctccctgaccaatgccttccactggatttggcatacattctcaagtacagctgctaccaatcattcccaatctgtgggtgtcaccctgttaaaggttgcccatgaatgtaatagctgttttatgtataggctatggagaccatatgaaacaattgattctttaatattcttaagatccttcagcttcataggttggcatacataagccatctgtccttgggggtgtttcttagtagatggcctttttaccatggtagctgggtaaactaatggagtatgagtaataaccttacaagaaaattcatgatacctgtttgtattccaagcatgtttgtgaatctttaaattgatctaagtgctcctctacactggatggtatggaactgccttctaggtattggagtctagattctaggtcatgatttgctgattttgtgtcctcagcaaatgactgtatggacctatctagtctgtctgccttgttatataagttatcttctaaacattcgaacctatattcaaatttgtgatctgctgccttagatgcttcaataattgatggcatggcattgtccaattcttcaaccgtatcctgggtattttgcacctttgcatctagtttctgggtaacagtgcctatctgagtttctagctggctacagatattcttttgttcgtcacggtcctttgacagcctagcctgtaacgcttctgtcatggaggatctctctgtgtttatcttatcataaatatgatgcatctcatcttgggtaacagacagctctgtctttagcatattagacacagagccaagcttatcatccaatttctgttccacttgctacacatttgtgcaaaaacctcattgcataaagctgttatttcctgtaggtaggtggagaggttatctttgtccctgctcctgagtactctggcttgtaatgttatttgtaccagtaagctaactcccatgcctgcatataggccagtaattggcagattagtgtcctcctcaaacattgaattcatgtaataagcaaaaatattaccaattttagcaaatgataaatcttctgctatgattttacctaatggctcctactccagatgcagtaaatatctttgaacagcaagtggcagaggtgtacagttagtcagcacagcttttggcagtagtcagtcaggcaagatggcagcagtggtggagagaggtcaaacaggcggctgtgattagcttagagagtttatggctgccaaggccaggggaacccgcaaaccctgctgaaagccaaggcctactcccgaggcctactcacctcaaggacaggaggcctctgggttcaggtaggcttcagttcaagccagtcacttgcacgcagctagaaactatgacagtaactgtggggaggtttgtggatgtctcccagctgggcagatgattttgagcatttcagcagcagtgggaggcactcatgtggcacagcaggtcagctacaagctgggagcacctgtggagagagggcgctttcccagcctaggccactgtcccggtggaacctgcagggtctcccaaacagggactaggtttacaatatcccacttctgacaccagataatgtgggaaattaccaatactgggccaggtaaaaatacaagggaatttaatagggaaaagccttacttacagagtgacctagccagctggcacacagcagtaagtacaggaagctgaagatgaaaatgaaagccggcttccacctaagcgtccctcctcttaaactttccctatgtcaccctgaccatgccctggtcaggtacaactgtagtcagcccctaagcaggcatggctacagcatcccctacaagccctaaaatttaaaactagaaagaaaagactggagaaatgcaatggtatttgtcaaatgtttttctgctcatgtgtattgtaagccaaaggatttatggacaaaaaaaaaatgagtaacacatttgtccacacattgaatgtcatttttagtgaacagcactgttgacagctgttatagccctgtatcccaagcaactcactcaatacaatttgcactgattctaatcatttctaaaaaggttgctgttcagaataaacacccacaaaatgaaagcttgtattttcagaggagacattgcttttcagtatgtttgtttatgtccaaatcccatgttatgaacacaacctacttttaaggtgtcagagacctgtaatgctcaaccacactacatgtattacaatacttagttccctaaatttaaactgtatgttgctataggattgagtgtgctatagaatgccagtagataccccttgccacacatatggccacacaaagatatattcataggaatttagccataaataaattctcagttgttttaaacacaagaataaatttattgcaaacacatttagatggatatataagctttcagtattattatctatatatttagtttcaaagttgagtttgtgcttttgcatattagcatgctgcatatttatactttatagatgtgattcctttcaaatgaaaataaagttgtttgtacttctgtgtcttgaggtatgaatatttgtaaatactttatagatgtggataagttcaactgagcatagaattgggttgaatcttggaaaatatttttgacccagagtcatatcccttcagccaattattttttgacatttggttttcattctaggaatattttgctatccatttgaattaggaacaatttcctttgtaacaggggaatctcaaatgcttaattttctatagacagcagctttccttgtaaagaaaaaaagagaacaacaacaaaaagcaaagaaaactagccaagaatttcatcagagcaagaaaaagagattagcaactcaaaggatcttgccctcaaaacccaatacggacaaaatagtctgtcaaagacagatgaaggtccacaatgagaatggtccatatacttagctaatgtactgtgtcctttttcagcaaggaaaagttgagaaatggataacagaaaacacaatgcaaatataagtgcacatcataaaaacattcaattttattgtcaaatacctgtcctataatttggtattattaataacatatattttataaatgcatatattatatattatgataatatttatatcaatcgtttataaagaaaatattgagtttttattataattatccatgatattcattatatagatatgtatgtacatatatagctaaaatttatgaaatgtgtgattttaactacaagagggctagacacactccaccaaaagacttggaagataattcaaatagtatctagcggatttccccttcattgggtagcacttaagaatacaagcacatgcttcccacacagctaaagaaactcttgttggggatggagagatggctcagctcttaagaatacttgctgttctcaaaaagaacccagtttcagttcccatcactcagatggtatcccagttccaaatcactctgattctgaggaatcttgttcccacttctggcctccatgtcatctaccaacatgtatggcatataaatgcatgcaagaaaaacatttatacacatacactaagaaatgctccatgtattagtgcttatatggagtgctaatgcagagacagaccaaggactaaaggaaggattacactcaattatagactggcaaatagaggtatcttagttattattgctctgaaagacatcataatcatgacaatggtgatgagtaaaaacatttaattggggtagctcacttaaagcttcagatgttcagtctactatcatcatggggaagcatgacagggtgtaaggcatacatgatgcttgagaagtagctgagagtcctatatcttgcaggcaacaggaagttgcctgagtcactgggttggaaacctcaaagcttgtaccaccagtgacacatttcctccaacaagtgcatgcctactccaacaaagccacacctcctaatagtgtcactgccttcaggagctatttttctttcaaacagtcacatttcacattttggctcacaaaagcttgtagccatatcataatacaaaagtgcattcagtccaacttcagaagtccccatagtctataacagtttcaaactcatttcaaagtccaaagtttcttcgaagaaaaaagacaacctcttaactgtaattccccataaaattaaaataaaaagcacattatatacctcccacatacaatagcacaagatatgtattaccattccaaaatgtagacaattgagcatagtgagaaaatgctaaaccaaagcaaccccccccccaaaaaaaaacacctgggcaaactccaaactcagcatcttcaagtctgatgtcaaaacagtgttcatatctcaaactctattcagctttgttgactgcaacacacttctttctcttcatctggttccactccttgttagcagttctactcagcaagtattccacaactctgacatctccaatagcttgggttctctaacaccacccagacttcaccatcacagatttacacaatatcttctctaaggcctccattcagggacactcttgacatgtgcatggcctcagtgactttccttaatcattttcttctattcttaactctaaaggaatatccacatggccccagctgccaagttctgctacttgttgggagtagaacatggccacctcactcaacttcactaccattttctgtttcactgcctaagcttgactgttctgtaacttgctctgtagaccatactggcctcaaattctaatatcagcttgctttggccttctgagtcctggaataacaggtatgccccatcacacccatttctaaattattctttagttccttttcacaagttggaaattcagctggatggaatcttgcccttaggtcaccacctatattctctttctttcgttattttattttttaaattagaaacaatcattttacatatcaattcccctgttccctcttcctcccatcctccaatgccttctaacaatgccctctacccataccccatctgatccccaaggacaagtgaggacttccatggaggatcatcaaagtctgtcacattatttgtgggagggcctaggcattcctccatatatcttggctgaaataatactcctccatagggaatggtctcccaaagtccatttttgcactagggataaatactggttccactgttagaggttccatagactgcccagacctcctaactgacacccatattcacagattttggtttagtccaatgctggttccccagctttaccactggtgtctgtgtgctctcaattggtcagttcaaatggttctgtaggtttctccagcaaggtcttaactgcttttcttaaccctcctccttttctacaagtggattccaggagtatgacttagtgattagctctgggtgcttgcttctactttcatcagctactggatgagctcttcagggtgcctggtttagtccggtgttggttccccagctatcagactggggtatatgaccttccacttattcaggtcagctgtttctgcaggtttttcagcatgtttttgacccctttgttggtcactcctccctctctgaaactaaattccaggagttgagctcagtgcttacctgtggatctctgtttctgcttccatcagctacaggatgaaggctataggatgcatttaaggtagtcatccttctcattataggggaatgcatttaaggttgcctctccactattgcttaggttcctagtttgggtcatcctagtggaaatttgtacaactccctagtgccagatttctctttaaacctttcatggctccctcgattgatgtgtctcttttcctctcctctattccttttcttaatacatttacttcattgaacaaggaattttacactattctattccctggtgctcttttactcctcaatttttaaatttatttttgtaagttacaatgttcaacctgttccttttcattataaatctttgtaagtgttaccactaataaccacacaacagagtctgtagaagggtattttgagatttccactgccaatgtaattatccaaaattcttcactgtagcctcaggaagactacttggaaaagagtaaaaagcagccattttttttttaaccaaaatatccaaagatcactgtctgggccacatactaacattcttctcctctgaaacctcttgatccccacagttcaaataatattcaactctcttccatgcttctaatactatagcccattaagctatttgcttattaaatttcactactttcctaattcaaattttcaaagtacatattactccaaaaaaaaccccaaataacaaacaaaggaacaacatatggtctagcctatcacagtaataccccagtcccttgtaccaacacctgtctttgttagagttattattgctgtgaagacacaccatgaccaaggaaactctcataaaagataacattttaaagggctggctcacttatagtttcagagggtcaatccattataatcatggatataagcatggtgaggtacaggcagacatggtgctggagaagtagctgagcatcctgttttgcaggcaacaggaagttgactaagaagctggatggtatccagagtgtaggaaacatcaaagcctttcacaacattatcacatcttgcaaaaatgcaatactcactgcacacagccacacctagcaatagtgccactctgtctgggggccattttcttttaaaccactacaagtagtttatattgtgctatttgcaagacaatgggtaaattgtaaggattactccatgaaagagaatttatctgtttttccccaaagcagttcagtgtctgaacatgcttatggagggtcggtgcctctggagctccagcctccattcaaaagggaccatcattgcacctcatcttctgtagtctcctttgggtaatcatatttgctaggagttcaagagtacaatggccttgtcatgcttggcatataagattctgtaatagttagacaatgggcaagagttgaattggtatagacttaaggaggtgaaagttcagaaatgtttagatttcatgaacatcatctcatttaacacatctgtacaacagagcttacatcttttacatacacgaggttgtgtattctaggaatgacacatggaaagggcattgtgaaaattaacatttaaaccatagattgaaaatagaaaaatatgaaatatttccagtttatacagtaggataaaatgcaatattatttacaaatattagtttactattatatggaaaacagaagaaatttgagatttttatctgctgttttaaaaatttcattatgtgacatgtttttctcaggatgtgtacaaatgtaaaagttgtcagtaaatgattataatttctgtttctaattcaactaatggttcctcagtagagtgaatttttttaatcttttatagagttaaatattttagtaggattttaggcttctctgtttcaatgtgttctgctcactggataaaataactcctgttgatattgccagaagaaaagaacaggaaaatgggggcatcatggtgcatgcttgattctctcttcatggtgttttctgatttctttttcccatgtagagagcgctcctttgaactcaatgaatgctgtgtgtgatgcagagataaaggatgtatagcgcaatacctaagtacatggagtgaaaaattggagcctcttgccttgagatagctaagcattcaaagtgatcacccctatcatgacagacataggactaaagggccatagaagcacttcattaaatataatgttcacaatgataagaaagagaacatgctgtccatttaagcaacaaagatttcaagagtttgcatcccaaagtagtaaactcaactgatactcaggaactcttgagcacagctctgagatatgggtaactaagttcagttagttttgttaagattatataatgatgaccttggtatcaaaaggcattgcaaaaattaatttatattctttgggaatcaaatgaatacataaacatcacacagcattgcctggctaagtcatggaaaggaccatttatctgtaatcaactgtccttctctggctgaattttgacaccttggatgtcaacagtactgaaaagtttatatttaaaatcatttacctgtgtctgaggctttttttagaagccctcattaactcttgttgatatcgccagaattgccttagtgggctccgacctctaaggaaagaaatagctcaaaattcttgaaatcaggagtgggtttgaaagtatgtttatacaatagtgagtattcatagaaaagtccaccactctctaaatccctgtgtcaatgagattttcaaggaatggcatctctgtgaaaggcttaacacacaagaaatggtgaggcatggtatagacctagtagtgcacctgacattgacatccattattttgttatttcccaggtcatctgtatatctatcaattctcaaagaagaaacagttagggataaatattgcttaagcttttaagatttgggatcaagttctttttttaaaaaaaagttttattttattttaaatattgtgtttctgtgtgtatgggtgttttgtcttcatgtatacacaacagaagagagcatcagataggttgaaactacattatagacagttatgagccaccatgttggtgttggaacttgaaaccaggacctgtgggaaagcacccagagctctttactgctgagccatctttctagccagaggatctaagttcttaattgtctcatctttactacaatatgccttcttaaattgtcttgcgtgtgtttcagaagtcctggaaacaaataattctacaaagaatttcaaaagtctagacactcacccaccatgtgctcacaactctagcacttcaaattttctgttaatgaaatgggctttctctgatttcagagcactgattgatagaaagaatgtacagagtcctaggttattgttttagcttcacattaacagactcatacatcctcatctcactaatatgggatttgttgatggcttggtttgctggaggcttgtctgtagctgcaaggagatgcgttccaacttttggaggtattggtcgcctgtttagaaagccttcagtccacttgtgttaatgcaacaccataaatgttcaggctaagtgtgataagacagagactttggcaggctaaagacttctacggaagatgtgtttcttgtaccccatttctctttctgccgcagagtttttctgtttcctcaaaaggagatatgaatcaccgagtccttaatacagctccctgcttactaaccccaggctctgcttttccttgaaagtataatgtgtggtagagattcacagtatagcccaggggagcacagctacattgggattttacagctggattatatgttggacctgtgacaatagggacacagattgctagcaaaggattcaatgtgggctgttatattggacctcctgaatcattgcttatgacattatggtaaaacaacacccctcctaagtgggagaagtactgactaaaaggatttggaattagatgcctgttgctatggtgatttcatgtttctctgggagataataaaatgctaagcatgattatctttgaaggtgaaagacatataaacttactggccttagagaaggccgaatttgagttttgaactagagcattagagcagtccatctccaggttcaattctaacactcactcatcaggcctgaccctgactataaaatgttaagatactgagtgaggatactgccccttgaattcaaaagccatatgtctgcagatctggggcctaaaccagttgttgaaatcttcacattcataaactgaaattcacatgctgttgtatctttccacctttagtgatacataaaaacttgtatgacatcaaaaagaacaaaacaaaatatatccacacatatacacatgtgagtcagcctctctgacatgataactaggtatcagtctcaatacagtctgtcaaaaagggagcactagaattgctagggaggtagggctgtgctgtaggatgtagcaatcctactgacagaaacacaggcaggatcataagaaatggataaaaatgtacaaagtcagagagaaacatcatgaaatagtgtactgcttttcacccttgctccagccatatttagcagcatttctgatatacttcatcagcattcacagaagaggatgcagtgttcattcttctttatctgactcgcttctccgaacacaaatccctgcagctcatccatttttgttgaaaaaaattctattatttgaattgctgggtattattctattacacatatattccacgtcttctttatctacgcatttgttctcagcatctacattgagcctgtatctcaactactcttgttatgacttcagtgtgcataggcataactcagcttttcctacatggatttcaatctctccctacacagcaaaatgtccagacaggtagatcacagggttgttcttttgtgagtgggtaaaaggatattcttagacttatccaaaatgtctgtgataatttacatccccgctgagagtatgcaagtcttctccttttcatcatgtatttatcagaatattatttttcaatttgatgacttagataattggcattacttaatctgaattgttcatgaatgtgtagattaacagtttatgtttcaaaagttaggtgttcaatttctgcattaatttaagattcattattcaagtggcagtcatttcagaaatgtcttttctcatgcaccttagggaatttttgttcaacattttctacacatttccctgtccaacatgcatgtactaaaagaccacctggagaattttccaactcatgtttaccatgctcaattttcattccatcactgcagtgaatcagtgtactgtacactgatcaatacacttatggtccctaggcaaaagacagcatacttctcgctatacatcctaccaaacagggaacttgtgtgatctttttctattgactagaattgaaaagaaagaacttgccaggtcaatagccaagtattaaaaatcaaaagctatattgatctcttctttaaagatcctacagaaagtaaatgtgcattatccacaaaatgcatggacctttgtattttagaggaattgcacatgcattaaatgttcataccttaggggcaactttcatcactctattctgtattctgtttagagtatgggagtttccccctgggattcagcacagcttatcatgtcagtccaggtaagacaggagagacacccagttcaaggacctacaatcactgcatcgtcaatgtgatcagggataaagactagatttctgtgtgattttgtgtttctaatgcagttattcacagaatgactgaataaactaccaagtataggctgaggatccaagtgccacttgggactcacaacttcccacttttggaattagggatgaacacagctgcatttgacagtgtttgaatagtttcagtagtactttactggatggaacatactgtgtatgagcaggtatcactatgttagaatatagagttatatggatctatgcccaagggtgttataggtgagtaatatggatgcagatttttgagaaccctccacactgaatgttattcctctattcacaatagccattaaaagaagaaaatagcctcaaagtccatcagctcatatacacatgatgaaaacagatatttatacaaagaaatattcagttattaagaaacaactttctttgactcctaattgtttttcaaatagaagattgtttaatttccttactcaatactatttcccatggccatgtcaaaagggccaaagtagacaaacaaaagattcccagagagtagatctggaggagctggatgagtgtgcaatagtgaaatataaacagtttaataacaacgacacttctagccaatgaggaaggaatgcaaaaatatataaagtgactgagctctaaaccaatcttctacatgtagtattgcccagcttccttcctccagaggcaaaagacagggcttgtagaattatttgattcaatattttaaaaatatcaatttttttataaatttaaaaatttctaaccctatgaaattaatactccttagaaaactgataagatttaaattttctcttgtcataaaattattttttttctctctatggagagcttctacagtattcacattgatgaatattatataaagtcatcgaatagaattgtttaacctttcatttgaacaatgattttattattaatatatgtaaaacacagatttgcatggttcctagaattattgattaatgtgtctttaaagcattgaatggcaaggaatatggtttccagtttgaagccatttttatccaaaataaagacatatacaatatatataaaattaatatatataaaattaaactgaagatttttataatggcagttcatgattgattaatctatactcttgtaaaccacaagaaaagtaaaattttgaagcacattgacttgtatattgtaaacatattttgaagtgaattactatatgcaatctctatagttagagtctaattgtagatagaaacacattactaatgtcatttagggagaaagatgggtttgtgctcttgatatgaaatgaatgttcatttctttcagaacatatgtcaagtgtcatttttcattaatctgtccagctaacaggatcttgtaatataactggattttgatgtcgttaatcaaaagtggatgggtatttcttaatgagtgacataagattttataatataatattattggtaaattataattctttaaagaaaacttcttgtggtaccttatcatatatcaaatgaattcacaagtaatcatgtttaaacaaatgttaaataattttaacattagtgctaccacaatgactacctaaaaagctgatcattctaattagtgtattgaaaagttattagttctaattgagagagtttggacaaatatgcatcaacagattgtatattttcatgttttgaaatggaaatagagccagatagttaaataatttccctcatgtttactcccaatatcatttttgtcttctggcatctggttcatcaggtgaaatataacttactttagcagtagcattaaattcttctacagctcattttctttacccagtaatgtttacctttttttgaaagctagtgatatgttggaaaacagtaacatgtctaactaacaagatttaccagtaaagagtataactcaacaaactcattttagaggttttagggaaaatacagtattttctatccaatagagaattggatataagccagtgccctatcatttattttaaagagtaaaatagtagatttgctattaatataatggtttaaataatggaacatctaacaaagataaccacaatatgtccccaaatgtcttaaatttatatctttttgaaaaagctaagaggcaacaattatagcaatatttgacttgaaggcatcaagatgggtcaccaggcaaaactacacagtaccatgactgacaacctaagttccatgctccggacccacaagttgcagcaaaagaactcacagttctgaactgcacactgcactgagaaaatttttggaaaatatttttactgcctcattattccattttgtttatccttgcattataagtagttttctttctctcatatgcttcattaagattaagcacatattttcttttatcttttaaatctttacataaaacatgtatttattttgaattgagctatcatttttatcttttatgacatacacataaatacacattgaggtacaatggaagctatgttttctgttcccatagaaacactatataaaacaatttagttaaaacattcccagtctttctgtgattgcattaccttgtccaggatgttttcttcaagttccatccatttgcctgtgaatttcaagatttcgttgttggtttatttcccactaagtaatacgctattgtgtaaatataccatattttctccatccattcttcttttgagggtcatctaggttgcttctacttatggctattataaaaaaaaaacactgctatgaacatagttgaacatatgtccttgttgtatgaatgtgcatttgggtatatgcctgagaatgaaattgctgaatcttgaggtagactgattcccattttcctgagaaaccatcatactaatttccaaagttgtcatacaagttttcactttcaccagcattggaggagtgtttctctttctccatatcctcccgagcatagattgtcactttttttttttattttagacaatgtggctagtataagatggtcatatatggatattagtcatacagcaaaggactaccagcctacaatccacaccaccagagaaagtaggaaacaaggaggaccccaagagaagaatgcatggtcccctgaagaaggggcgagggacaagaacccttgagcaaattgggaaaatggggggggagaattgggacatgtgaagggtagaggggaagaagtgaagggggagaacaggagggatcaggaggattgagataggggaggaatagaggagggcaagaaaggagatgccttgatagagggagccagtatacgtttggagagaggtctgccactggggaaatgttccgtgacccacagggatgaccccacctaggaatataggcagtggtggagaggctacatctgatgcccttcccctataatgaaagtgataactacctaggttgccattcctagagccttcatccggtagctgtttgaatcagaatagggcacccacagctaaaaactgagacatactcctggaatccagttatggagagggaggagggatgagcaaaggagccaaggctttgctgggaaaacccacagaaacagttgacctgacttagtgagagcatggagacaccagtcacacagctgaagaatcagcattggacaaaaccaagccctctgaatgtgggtgccagctaggaggtcatagcagtatggggcatctaacagtggagccagtgtttatcccttgagcacaaatgaatattgggagcccgttctctctggagggataatattgcaacacagatacacaaaagagggcctaggcccttccacaaatgatgtgacagactttggcgatcccccatgaagggcctcactatccttgaggagtgggtggggatgggtaggagttggtatggggggcgttctgagagagtgggagggagaaacaaaattaaagaaagagaaaaagaaaaaaaataaagcacaattcctggtctcaataacaaaaccaaataaaaaagatagccacagtcataggttatcagaattttacactttctgcttcaaatgcttaaagaggacttgctttcttacttatttaaacatttagctatattagacataaaactatttcactcatttttgtaaaccttaaatttctttcttttagtaattgatgtgtctgcatgttaattattttcaaagaactaatttcccttttttatttatgtcaaacatttctttttatactttgggacctttttatttttattcagtgaggaaggccactcagggcccagtgcagtgtacagtttggaaatgtcagttactttactcaaccttgtgggttctgtgcattgaaaacttttgcctctggttgatcttgcttccttgaagtcaaatattgctgtagcagttgcatattagcttattctgaaagatataacttccagacacttgaggacatgtgttattacctttactagctattctattatttaaggcattatattaatatgaaaatattttattatattctttaaaacttgaagatcaagcactggtttggtccccaaaacctcttggtttattgaattatactctatataggaaaaacttgttagttggacacattattattaccttattaataatactaaacatattatttaaatatgcaataatccttcattcttttaaatggtagtttcataaacatgcacatctatatatttgtcttttttaagtttatggaatcttattgctttcattattttatttaaattcattaattactactcatatttacatatccattccccccattccttcaacctcagatcctctcatgtcccccagcaaccccccaatacatccccaaaatcctccccaaggatagtgaggccctccaccagggacctgcaaagtccatcatatcatataggggagggcctaggccctcaattctgtatctgggctgcaataatatccctccataggaaatgggcacccaaagcccatttgtgctctagtgttaaaggctggctccactgttagacatcccatagactgccttggtcttctagttggcacccacatccagagggcttccttcagtccaatgctgtttctgaagctttatgacttgtgcctccatgctgactgtgacctttgccttacagaagcttctcagtttcaagaggttccatttattaattgtcaatctcaatgtttgtgctactggtgttatgttcagaaagtggtctcctgtaccaatttgttccatggtaccacctatgatggggaatgtgctactgtgtatgtttatcttattgattattgaataaaatactgtttggccaatgagacagcaataggagtcaaagagatggaaataggagtcaaagaggattctgggaaatgtagtagagaagctgaaccaggcaggaagtgacataacaaggagactcatatttaagcgaaagagaaacaggaagggctctgttttcccctcggctcctgcttcagcagcatgatgtgatcactagctaggagggatgccaataaggtgtccaataagataaatcttataaaatatatagatgtatgataattgagactgagctaacagatgagaatcctagtcattggccaagcagcattgtaactaatacaagtctctctgtgtattcatttgggcctaacttgggcagacagctgttgtaaagctcacacgtggcagtggagctcaggcagcttttggtggaaagatttatcttaacacacccaccttgtcatctaggaggttcagtgtggctgaatttatgttgaggttcttgatccattgggatttaagttttgtgcatggcgatagatatggacctatctgcaatcttctacgtatccgaatccagttatgtcaacaccatttgttgaagatgccttctttcttccattgtataactttagcttctttgtcaaaaatcagttgttcataggtgtgtgggttaatatcagggttttcaatttgattccatttgtcaacctgtcaacttttgtcctataccaagccattttcagaactatggctctataatagagcttgaagtcagggatggtgatgcctctgggagctcttttattgtacagggttgttttggctatcctgcctatattgtttttccatattaagttgagtactgttttttcaaggtctgtgaaaaattctgttgggatttagatgggaattgcattgaatttgtagattgcttttggcaagattgccatttttactatgttgatcctacctgtccaagagcatgggacatctttccatttcctggtatattctttactattttttctttaatgattcaaagttcttactattcaggtctttcttgtttttgtttagtgtcaccccaagatattttatgttgtttgtggctactgtaaaaggtgatgttcttctgacatctttctcagtgcatttatcatctgtatatagtagggctactgatttttttagttaatcttgtatcctgcccctttgatggaggtgtttatcagctgtatcagttccctggtagagttttttgggtcactaatgtaaactatcatatcatctgcaaatagtgaaaatttccttcttcctttcctatttgtatcgccatgatctcctattgttgtcttattgctcttgctagaacttcaagtacaatagtgatgcgatatggagagattagacagccttctcttgttgcatattttagaggatttgccttgagtgtctctccatttagtttgatattggctgttggtttgctgtatattgcttttatgatatgtaggtatgttcctgttattcctgatcacttcgaaggggtgttggattttgtcaaaggctttttcagcatctagcaagatgataatgtgatttttctttttcagtttatttatatggtggattacattgaaggattttagtatgttgaacaatccctgcattcctgggataaagccaacttgatcaagttggatgatttctctgatgtatttttggatttgatttgccagtactttgttgaatattttgcatcgatgttcatgaggtatattggtatgtaattctcctttttcattgtgtctttgtgtggcttgggtaccaaggtaattgtagcctcatagaaagagcttggcagtgccccttctgctactattgtgtggaacaaattgaggagtacttctattacctcttctttgaatttctggtagaattctgcattgaaaccatctggccctgtgctttattttggttatgacacttttgatggctgcttctatttcattaggggttatagatctgtttaaatcacttatctgttcttgatttaattttggtaagtgatatctattcagaaaattgtccatttcctttagacattttaattttgtgtagtatatgttttcttttttgtcactttttattagttcaaattaggaaaaagttgtttcacatgtcaaacccttctttttctccttctcaatcccctccctcccacctctatcaactacccccagattactcccaccccatccatcctccactccgagggcagggtagggtcctccactggggcttcccaagtccaccacatcatcctttgctgggcctaggtcctccaccatgtgtccaggtcaagaatatatcccttcatgtgggatgggttctcaaaatcccttcttacaccagggaaaaatactaatccactaccagggactccctagatggcagagtcctcctaattgacatccatgttcaggtgtctggaaccagtcctgtattggcctcgaagacagcagtctgtcgtccatgtgctcccccttgtacaggccagctgtttctgtgggtttcaccagcctggtaccaagccctttgatcttcattcctcccactctgcaactatgttccagagttcagttcagtgtatatctgtgggtatcttcctctgattccatctgccactggatgagggctctaggatggcttaaaaagtagtcatcagtctcaatataggggaagggaagtttaggttatcctctccaccattgcctagattgtcagttcatgtcatctgtgtaggtctctggaaatctccctagtgcaagatctctctttggactatatgggcttcctttgatatggtatctctcattctgctctcatctattcttccccaaactcaatatttctgctcctccatttcctcctctcctcttctcctcctctcattctgggagctcccactccccttcccacatgctcccaattagctcagaatttccttccccttcccattcctgtggtccatgcattttccccttagagtccatcttgtttcttagtttctttggtgaaaggattgtaggatggtaatcctttgctctatgtctaaaatttgtatatgagtgagtacataccatgtttgtctttttgtgactgggttacctcactcaggatggtttctgctaggtccatccatttgcctgtgaatttcaagattccattactttttttctgctgagtagtactccattgtataaatgtaccacattttctctatccattcttcagttgaggggcatctaggttgcttccagttttgggttattacaaacaatgctgctatgaatatgtttgaacatatgtccttgttatatgaatgtgcattatttgggtatatgcccaagacaggaattgctggatcttgagttagactgattaccgttttttggagtaacagccatactgatctccaaagtggtcttacaagtttgcactcccactagcaatggaggagtgttccttttctctgcatcctctccagcatagattgtcattggtgttttttattttatccattctgacaggtgtgaggtggtatctcagagttgttttgagttgcatttctctgatggccaaggattttgaacactttcttaagtgtctttcagccatttcagatacctctattgggaattctctattcagttctccaccccactttttaatttcattgttttgtgtttttttgtggctagcttcttgagatcattgtatattttggaaatcatccctctgtcagatgtggggttggtgaagatcttttcccattatctgggctgttgttttgttttagtgagtgtgtcatttgctttacagaagcttttcagttacaggaggtctcatttattaattgcagatctcaatgtctgtgctacaggtgtaatgttcaagaaccagtctcctgtgccaattggttcaagggtatcccccagttgctattctagaaaatacagtgtggctggatttatgttgagatatttgatactttgcacttaagttttgtgcatggtgacagatatggatatatctgcaatcttctgcatttctgaatccagttatgccagcaccaattgttgaagatactatctttcttccattgtatagattagcatctttgttaaaaataaggtgttcataggtgtgggggttaatatcagggttttgaatttgactccattggtctgtctgtctatttttgttccaatatcaagctgtttttagaactatggctctataatagagctggaattcagggatggtgatgactccagaagatcctttattttacagagttgtttgggctatcctgggttttttgttttttcatataaagttgagtatggttctttcaagttctgtgaagaactgtgttgggattttgatcgggattgggttgactctgtagattacttttgacaagattttcattttcactatgttgattttacctatccaagagcatgggagatctttccattttctggcatcttctttaatttctttctttaaagactcaaagttcttaatgtacaggtcttacacttttttggttagtgttaccccaagatattttatgttgcttgtggatattgtgaatggtgatgtttctctgttttctttctcattggatttatcatctgtatatagtagggctactgaattttttagttaattttgtatcctgctactttgttgaaggtgtttgtcagctgtaggagttcccaggtagagtttttcaggtcacttatgtagagtatcatattatctgcaaatagtgaaagtttgacttcttcctttccaatttgtgtccccttgatctccttttcctgtcttattgctctagctagaacttcaactaaaatattgaagagatatggagagaatgtacaacattgtcttgttcttcattttagaggaattgctttgaggttctctccatttaatttgatattggctgttggtttgctctatattgcttttatcacgtttaggtatgttcctgttattcctgctctctccaagatctttatcatgaagggttgttggattttgtcaaaggctttttcagcatctagtgagatgatcatgtggtttttcatattcagtttgtttgtatgatggattacattgatggatttcatatgttcatccatccttgtatctctgggatgaagcctatttgatcatagtggatgacttttctgatgtcttcttggatttgatttgccaatatgttgttgagtatttttgcatcgatgttcatgagggatattggtctacagttctttttttttttgttttggtctgttgagacagggtttctctatgtagctttggaacctatcctgtcactggttctggagaccaggctggcctctaattcacagagatccccctgcaactgcctcccgagtactgggattaaaggcaggtgccaccaacgcccggcaactgcgtctatttcatcaggggttataggtctatttaaactccttatcagttcttgatttaattttggtaagtgatatctatccagaaaattgtctatttcctttagatttttgaattttgtgtagtacagttttcaaaatatgacctgatatttcctcagtgtctgttatcataccccactttttgtttctgattttgttaattagcatgctctctctaagcctttttgttactttggatagaggtttgtgtatcttgttgatcttctcaaagcaccagttatttgtttcattgattctttataatgttttctagtttgtactttatttatttcacccctcattttgattatttcctggcatctactccttcgttgtgagtttgcttctttttgctctaaagctttcagttattctgtcaattctctaatgtgacttttctccagtttctccatgtgggcacttagtgctatgaacattcctcttagcactgctttcagagcatcccataaatttgggtattttgtgtctacactctcattaatttctaggaagtctttaagtttttttaaatttcttcctcaaatcaggtatggtgcaatttcgaattattcaaattccttgagtttgtaggttttctgcaatttgtattgctgttgaattctaactttaaagcatgatgatctgaaaagatacagggggttatatcaattcttttgtatctgtggaagtttgctttgttgtccactatgtggtcaattttagagaaggtgccatgtggcactgagaagaaagtatattcttttttgtttgggtggaatgttctacagatatctgtaaaaaacagttgggtcataacttctgttagatcctttgtttctttgttaagtttctgtctgttggtcctgtttagtggtaaaagcaaggtgttaaagtctcctaatataagtgtgtgtggttttatgtgtggtttgagctttagcaatgtttcttttacaaatgtgggtgcctttgtttttggggcatagatgttcaggattgagacttcatcttgatggacttttcctttgatgagtatgatatgtgtttcttcatctcttttgattgattttagtttgaagtccaatttattagatattaggattgatacactagcttgtttcttggccccccttgattggaaaatcttttcccaaccctttactcgaaggtaatgactgtctttgaagttgaggtgtgtttcttgtaaacagtagaaggatggattctgtctttgtatccattctgttagcctgtatctttttatacgaaggttaagaccattgacattgagggatattaatgtccattgattgttggttcttgtttgttttggatttattttggtggtgtcattgtgtgtgtatttctctctcctctttcttttcatgtttggtaaaatagaattatctattgcctatgtttttgtgagtgtagttatcttcattgggttggagttttccttccagaactttctgtagtgctggttttgtggatatgtgttgtttaagtctggttttgtcatagaatatcttgttttctccatctatagtgattgaaagttttgctgggtacagtagtctgggttggcatccatgctcccttaatgtttgtaggatatctttgcaggaccttctggctttcaaagtttccaatgagaaatcgggtgtgatactgataggttggcctttatatgttacttggattttttctttgctgctcttcatatttcctcttcattctgaaggtttggtgttttgattattatgtggcgaggagaccttttttggtccagtctatttggtgttctgcaggcttcttgtactttcattggcatgtctttcttaggttgggaaagttttcttctatgatttttttgaatatgttttctgcacctttgagttgggttccttcatcttcttctatacctattatccttaggttttgtcttttcacggtgttctatgtttcccagatattttgtgttaaggatttgttggacttaagattttctttgcttgttgaatttgtttcctctagtttatcttcagcgtctgagattctgtctttcatctcttgaattctattggttatattcacacctttagttcctgatcctttatccagcctttctatttccagcattgcctcattctgtgttttctttattgtgcctatttcatcctttatgccttgaactgttttgagagcttccttcacttgttttgctgttttttctaggctttctttagattctttaagagatttgtttacttcttgaattttttggtttttcttttcctccatctcatgtattttttccttgttttttcttctatttctttaatggattttcttgtttcttctttaaaggtctctatcatcttcctaagataaattttgaggtccatctcttcttcatcttctgtgttaggcttttcatatctttctggtgtggagtccctagattctggtggtgtcatattggtttttctgttgttgagtgtgttgttactctgtcttcttcccatcccttcttcccgtgagtgcaggtggggtctctccccctctttggtggctggcggagggctcagccactgacagcagccagatggcagagggtggtgggtggacaaaggtggggagtgtctggactcagggtgggccttcatgttttgggcaggtccactcttgcccaggtgggctcaggcagaagtgagcaggggatgtttggggaggtggggaggcagagcagtgcacagattcacctcagactcaggcacacaccacaggatagagggcagagtgtagatagaggggtgaggtgtgttagtatagatttccaaaatttggcctgatgattttctggatttcctcagtgtccattgttatgtcccccttttcatttctgattttgttaattagcatgctctctctctctctgccttttggtttgtttggataaaggtttgtctatcttgtcaactttctcaaagaatcaactctttgtttcattgagtttttgtagtgttttgctggtttctaaattttattaatttcagtcctcaatttcattatttcctggcatctactcctccagggacagttttcttccttttgttctagagctttcagttgtactgttaattctgtagtgtgactattctccagtttgtgggcacttattgctatcagatttcctcttaccacggctttcaaagtgtaccctaattttcggtatgttatgtcttcattctccttaaattctaggaagtctttattttctttttttatttcttccttgacccaggaatggtgtaattgcaaattactctattccatgagtttgtagagtttctgaaatttgttttgttgttgacttctaactttaaagcatgatggtctgataagatactgggggttattccaaattttgtatctatcgaggtttgctacattgctgaggatgtggtctgttttagagaaggataatatggtgcggagaagaaggtatattctttcatgttcaggtggaatgttctatagatgtctgttaaacccaattgggtcataacatctgttaggtcttttctttgttaaatttctgtctggtgctcctatctagtagtgaggaggggtgtggaggacatgagagtgcaggaaaatttagtcaggggaagaattgaggagagcaagaaaagaggtaccacaatagaggtaggtttaaagagaattctggcactaggtaaatgtctagagagctatgagtttggtcataattaacaatctaagcattggttgagaggctgccttaaatgcctttctctgataatgaatatgatgactaccttatatgccatgctagagccttcatccagtagctgatggaagcagaggcagagactcacagctaaacactgagatgaactctggaatgcagttgtagagagggaggagtgatgagcaaaggggtcaagaccagactggagaaacccacaaaaacagctgacctgaataagggattgctcatggaccccagactgatagctgggcaaccagcataggactgttctagacaccctgagtaaggatgtcagtttggagatctgggcaatctatgtggcttctggaagtggatccatatttatccctagtatatgagtggactttaggagccctctccacataaaggaatagtctctcagcctagacacatggggcagggtctaggctctgcttcaaataatatgacatattttgaagatcctccatggaaggtttcaccgtccctggggagcagaaatgggttaggatggggtgggggcaagtgaggaggggaggaagaggtaactgggatcgacatgtaaaagaagctcatttctaatttattttggtattttttaatagttcaaattatgaagaagcttgcttcacatgtcaatcccttctccctctccctcccctcctccccaaccctcccccttccctcacctgcccccccaccccatataccctccactcctcaggcagggtagggccctcaagaggggctccccaaagtctaccacatcatcctgggttgggcctatgccctcccccatgtgtccaggccaagagtgcataccttcacatgggatgggctctcaaagtcccttcttataccagggaaaaaagactaatcctctaccaggatccccctggaatgtgaaggcctcctagttgacatctaagtttaggggtctggatcagtcctgtgctggactctctaagtttttctcaactagggattttctgtttttcatctcaacatgatcatttggttatgcttaactgtcgtgggagttagtgcaaggtcatcatggtcacaccacatgcctcatctatttccagtatagattataatggatataaggataggaacctgtaacttaaaggagattttacctatgtgtttaatttgtttaagtattattgtgtaaatgaagaattatgccctatatatttattaaactttactttgtactagataccatgtggatgttgaagacttcataaatttctgtgactagagaaattgtaaggtaaaagccctcatggaataattcctttcattaacttgtaatcaattgactctattgaggcataaaaatatcaaagcaaaagtacccctccctgatgcttcagagaatatttggcatcaattagaagaatggtacagaagctaaataatagagaaactttaaaagaattagtgatgctctcatatatattaaggactataagcaacatgaattaaaatgcaaaatgcctttggttgattagctatacatccataacatatattcaaaaggcctacctcagacatagacaagatctgtgatttttgcttcagcctttgcaagcccctatgagccctgcttagttgattctgtcttgtattgtcatggttctccaatttctggcttcagtaaaccttcttccccatcttctgtggggttctgggagcgctggctagtatttggttacaggtccttgcatttgctcccatcatttgtagatagcacttctctctgatgacaattgggctagattttgatctacacatatagtagaatatgattattaatcacttcattggcttcttttattccaaacatgtttggttctgttctaagtctctgcctgtccagaacctgattctcagctatacaggcagtgtcaagggtggtcttcctctcatggcatgggcctcaatttgtttgagtcattggttgaacactcccacaagttctgtgccatcattaccttagaacatctcacaggcaggacaaaatgcagattgaatatcttgggctgtattgctatttgactctcactagtgaaagccttgcctagttttagaagatggatggtttaggttccatacccccattactaggtgtctttgctagagtaactttcccaatttccagggagtttccactgacttaggtttccagggagtttccactgacttaggtttccacatctccctccctctgtctccctcttattccagttgtctctcccagtatgtcctcctcatctcttttgattaatttttatatttctttagttagatatgagaatgtctatatcaccttgcttcttagggccattgggtaggaaattttgttttaacatattctttgctgtatttcttctgttgtatcatcaacacctgagattctttcttccatcttttctattctgttggtgatgctttcatctacagttcctatttgccttcctggaatttccatttccagaattctctcaatttgtgttttctttattgattttatttccaatttcagatcttcactagttttattaatttccttcagtttttgtttttttcttagcttccttgactttcttcaagagatttcttcaattcttcctatatttagattgtcttttgtcaatttctttaatgcatttattcatattctctttaatgaactccattgttttcataaagtttgttttgaattaattttcctatgcttaagtggtattggaatatccatggcttattgttgtaaagtaactgttctttgggagtggcatactgcatttgctgatgttgaatatgttcttacactggagtctaagcatctatatttgaggtgattataggtgtaggcgacaaagtctgtttttttttctttgttgaattagtgttttattttcttcccttggtttctatttctttgatcttttggctggaatggcctttggttgagtaaagtgtctccattcaagttaggggctctagttctgatggccgcagtggtctcatgttgagcaggtggtgtctttgtgatttggggtttcaaacatgccattgaggaagggtgggaattgggtatacggtgggtgggaactgagagaatgagtatttggccccaggtgggcagcctaccttgagatctggtggcctgttgaggcctctggtcaactaggatgcccctgctggagttgtttgccaggaaatgatgtcaaagaagggaggggtgattttaagtagtgtgtgcaggcactgagagagtaggggtgaactctgagatgtttgcttacctggatacaaggcagtctataagtataaaattattagtgtcttaatgaaaggcattttagcaagggaagatggaacagatgtatctgtttgcaaaagtgattggtgtcatcctaaggatctgagttccctcctcagaatccatggtataagggtagaaacagcatagagagatctgatgcctgcttttaggctttgtgaaatgtaactacagccaggagacaattttgaaaccaatttcttagaattggaaggggaagtgacttaaaatcattttggtttgaaaagttagtcttgtggaacagccaaaccatcacaaacctttctactaagtgaaaaatcagtttatctgttgatgtccaagctgttactaagaataatttttataacagaacagcttcaatgaaataggcctctgagaaccccagtcattaaattattgtgtttgggtaggagatgagtccatgattagaagtgaatttttttccttgttttaaaagtataaaaaaattgcaggacttctcagtatgtgatgatttgtaatgctaacaaattgggtattttctgattttgaactagttattctggactcaacacaaacatagaaaccaggtgtggagcacttgtccaggcagacaccattcccagtgctttgagaattccaggtgtgaggtttgtgcagtatggattctcatgctaatttgttatgaggagatactgttcagcgaacttccagaaaatcatcattattttctattgccagacttcataaggaaaactttttatctaaacatttataaatgctaaagtcaaaattttgttttcaagcctaacaattacacacttaggatgatgcctcagttagtcccccttttagaatttgaattcatgtttcagttattttcttttttctctgacactttcctgcgtttgtttccatttttatgacagctcagtgtttactacagaaactatacacactttgaaaatcaatattatgagggaacctggtggacttgaatgacttaaacttttctgtattttattgctgaagcagagcagactgcaaaatggccctgatttcagaagcttcttgaacaagaaatatacatggatcttggggatttaaattaaaagaagaaaatctcatggaagagataagaagcaaaatatttttccacgttttggtaaggaagagcagacagcttatggagtgctctggagatatgaagttatggtgtctagtagtttaccaagaacagaagacaaaggctgtaagaaggcaaaaagaattcatttccaatgtggaaaatcaggcatctgttagtctccattctgctgaataagaatgttcaaaataagtaagagaccactcatcatattgagatatgtcataaaaacctgactctatactagccttaacctacctgtctataaagtatgccattttccttttatattcattccacattagcctgtatacagcaatatcaccaggagaaacaggataataaatctatctatatgtttcttcactagacataagtatcaaaatttgtatttcaaatttagtattcaacttgcattaaaacaacttacaaaatgtttaatcttttcaaaaaatttacatgcaacattatctaacagtccttatttttttcccttgagagaagagaaattgaaaatagacaaaatgggatattaaaaaacataattgttcactgtctagccacttctgcagagagatttaacagttaattcatttcagtcaataatttgaggaaaagcctctttattttcttaagattcaaaaaaaatggtcagaatcatctcttttgaatggtgggaaaatttgtcatctcacttttctgaccatggccttttcatcagttgacagttttcaaatagcatcattgatgtaatcccaccctttaattccttttaattgatttttataaaacaagtttgcttaggcttctgctatttagtcactatcctgagtcacagtgacaagtaaaatctgtaggtacagagagtaaagaatggttccgtggattcctggaccaccacataattatccaaatgtaacaaggacccaaagaatggcaggcacatgtgatgtgctaattagatgcttaggtgtcattatctcccctggagataatacttaattcagggagctgttgtcagtgagtgtggaactagatggcctatactaaagaccctgagttctgccactattttgtcatgatggattgacaagtaggttgacttccatatggtttcatctccttctccatcaaagagtgaaacaacagcatgttttcagtaggagttttagaaggaagaaatgagttagcatctgtaaaaatgattactacagatcctggtacatgaacagatgatataactcttagttaagaataaacatatttaataaatatggactatatccaaagacagcaacaagtgtgtttgagtatgtttgtatgtatgaagccaagtttgtagtccctcctaagttgatggaatactaagttgaaatactttagttagcaagaaatgatcaaactctgaatcatcttttgaatcaaagtacctaccaatgctatgctgcaggatcataactccttatataatgcaataaatgggatgccaggtcattttcaaattaccagtgccttttctttgaaatataattttcttaagaattctttttaagtataaaaatatctatacctatatatcctctacaatatttttctttaaaatgtgtatacattgtaatacaaaatcaaactgaataccatcccttctttatcctcgttagttttttatttaatacatcttaagttagaataagatttacatcatctcccctatcattttcttctctttaaaccctcccatgtctctacctttcagtccccatatgtgtgcctccatctgtctcctactaaatttgatggcaattctttatttgattatacacacacatatgcacccatacacacatataaatacaacagataaatacaacacattgaatctgtttttgttgtttgtatatgtgtaatttcagggatgcttgctgtgcattgggcaaatacttaaaggagccatccttagatgggctaatttcctctctctcagcagtcatgagttgcctgtaataattttgttcaggagtgggactctgaaaattttcctttcctgattagcatgtctcttgatattttctctgtccagttcctctttaagcagctatttctaggaaacatgatctcaaatcagacttcccagtcgtctgcattgaacagtattcctgcctccacgaccacggtgttccctgagccttaggtacagaagttgtgttgaagatatatgtgcgaattcctgcttggtatgcagttgtggttttcagtaaggtccatttgctacaaagtgaagttctttgatgacagctgacagctgcatgtatctctgggtatatgataacttttagaatgcagccagcaattttattgctccagtaaagtaataatataagattctgcaaaaaaaacagggcctcttcagccccagggagttggcaatgtttccagtataagctatcatgatttcctttctgttgagcaggtcttcagtccaattagacagttgacgcttatgtccaatgtataaacaccaccactgcgcctttaatgtttgtgtgtgtgtgtgtgtgtgtgtgtgtgtgtgtgtgtgtgtgataccacttgggctgacagtgctccatacaagaaccataggttacctaacaaaatctcctgtaccacatgtgaaaccctccatttgaatttttggtcaagggggtccaagtgactctcaagacaacaaaagctttaattctcttgtttgaggcccttgtttgcctctcagaggtggaaggatttggggactttctggtgactcagatgtttcaagctggctctaacctgaaaacctcattcctnnnnnnnnnntcctgctgcatgccccttactatgggaaagtactagtgcatagtaccaatggagggacaccatcaacagccctttctaactatgatatctatgaacaacaatgatgatcagtgtttgtcattaatacaatctggaatcaattgggattggaaaattcgcccccccttgcattggactgtgaccatgtctgagagagaaggccttgactgatgatagatgtgggaagtgctcaccaaatgtgggccacaatcactgattagcctgaatatataacaaagcatgcaggcagccagacaaaatgaggtagccattaagcagttttccttcatggtttctcattgacttcctgacctcacttccctcagtgctaaattgtgaacagaaatataaacaaaattaactgtttcttcctcaagaagagttagtcagaatatcacaatatttaacaatatgagtgctattaattatagtttgtacaatatgaatgaaaataaaaattaaagaaaatagaaactatggagaagatatgaactgcataaatattctgcgaaatcctcatcaaaattctagtagcatcattatcagaaataggggaaataattattagattcccataaaaaacatactagctaaaatatcaaagcaattgttaccaagatcaatgaaaaacatcacattataaaacttcaatatgcactagagtattaaaatcaaaacacaatagtatatttatttatgtgtgatatggttaaataatcataattcatgataactatgcaaaaacattcaaatcagtattttgaaaccatatctgcattccctctcaagtgtgcatttctgctaatgtccaatatatataaataatattagtctgtcaaatggtaaacaagaaaaggtaatgtattatatatcaaaatgtataattatatattcatgtaataaaggaaattgtgtcatttatgacattgtaggtaaattcagatgaacttaattaagacattgaaatgagaccatagagagacaaataattttgtctcgtgtatgcataactttaaaaatttagaatagttttgccagggttaaaagatttccctgaagcatgagaaaataggcaaagacatcttttgctatgagtaaatgtgagaaaaatttaaaaatcatttgacagtaaagccatgaattattttctagtcattctatcctcttacattagccagcatctttattttattcctgtgccatgttgtttgaattcctagtattctgtagtatagtttggagtacaataaatgatgtatggagtatgatgctaagaattcacatagtggaaaaatgaaaatgtttcctgcattttaccagtgatgactggtatgtatcatgtggcataaaagcattacgtaataaaaaagtagagagcttaccatgtttacacactctagcaaattcaggacactacagaggcaattgtgtattaaataatatctatcagtttacaaaaacagcagaatattagggagtggaatgaggatagatggtacacaatctttttagaaatccagtcaccatctattaatgtattttatcacagagttcctattataactaatataactgcatggacattgatagtatttcctgtgttataaaattaatgaggacctgttttcagttggtgggagaatagtattccatattcagaacacggggaatatggaatactataccaactctctcgatcttcctcaacctcactgagcctcccctcttctatttcctccctccccctcctctttcttgctcctttgctttcctttctcctccctgactcagatccatggtatatagtttttgtctatttttagctgataaaaaagaataaatctttcaggaaggactcaattcagaagaacattcatattccaaaattaatatctattttcagcctgatctttttatgcaaatgtttcatttaagtaccagtatcctttgattttttttttttttttttggattttcgagacagggtttctctgtgtagctttggaggctgtcctggcacttgctctggagactaggttcacctcaaactcacagagatctgcctgcctctgcctcccgagtgctgggattaaaggcatgtgccaccaacacccggtgaaatttggatttattacaactttaccaaacagtcctaactgagtttgtaaatctgccagtctcatgaacatgtgaagcatgaatgactcatatattgtcacattatgaagagcttttgcttgtgtatttatcttctgataccttctggcacatttagtaatttggcattctataatgcctgctttacatttgtaaaaaaatgtcttccctcttggtatggaacagtgacagatgacacctttaacattttacactttacttatttatgccacagattgctgccatgggttattattaaagtaaactttctccaataccagtacaatactggttaatgggtttgtgtctgtttaactgaaaactctggagaaggtgtaatttctgatgacattggcagtccattttggaacaaataattttaataatgccagcaccttctaggagctttcctctctcagctactcaaacattgcctttttgtctattgtcatatgatcgaaggagctattgaggcacaaagtcagttgagattttggtcttcactgtgatgcaaagcatcacaatcagtcagagagtttcaaatttcaattttctgtggctatgaagaatttcaaacattccttggcacaagcatctaagcttccttgtccttcagtatttttggagcttctgtactcttctcaatagagaaatgtaagaagtttcagtccagttcatactgaattaaatatcattaccctcccttgataaagcatgtttggaaggtcatggggaattttctctgtggatcttctcagagatccaggacaatgcagtaggactgctgtgtgacagagagcaaggagacttggctattgatgtgtgagacacaaagacttgtgttctctaagaacacaagttcttagagagagatgagtatgatacaaaaagccaggaataaaatgagcacagatcacccagaatcagagacctaaattaggtaaagccaaaaaattacattgtttaataaaattgttttctaatttttagcatatatatttgagatttttgctatgacattcccactaattgatgccctattgaacaagtaagttttttatgactgtattcattgtttatttgaaattgaaacaaagcagacattctgtagcaagtaaaatacgagacactcagatcaacttgaatctcagataaataatgaacattactttatcatagcatgtgtaaagtattatatgggataggcttatgctaaaccttattgttcactggaagttcaaatttaactgtttcctcagtttttacctattggattgggaatcaccaatgaagtagtatccctgtggtaggacaagaaacagcctcaggattaaaaaccaaacaacagaagtaggacatgaatctaataaagagccgttgaaagatcatttaagcctagaacttacactgaaaaatacaccaataatagctaaagaatagagagaagcctcagagatgtaataatataaacttgaaatatgtaaacacaacagtgcaaccaatacaaatactcagtgtgctcaatgaaggaacatgaggttatctgaaagataaattatattgttcaaaactaagagttcaatagatatggaaacacacattttaaatacagttgacctgttagccatgtattttttatttcaattattacggcagaacaagtaaattttaaatacaaaatgatatgttataataagggcaaaatgcatattcattataataaaagtccttaagtccctggattcctatttgactcttcctgctctttgttgctcacccacattttgtgatttattgtgcaaggtattccttcctaaagtgtcagtaaagatgcagccttgggcattttttcaaatggggactctgggtggataatgtggttttttttttataaccttttatgcaacttcaaatactgccatgaaaaataatttagcagaaaaggaaaggtgaggcacaatttaacatttccttaagaacatgattctggaagttcacattaaaaaacaattttcnnnnnnnnnnnnnnnnnnnnnnnnnnnnnnnnnnnnnaattctgcagattatatttttgactgccttactgcttttgtaataatgaaactttagatgaagtaatagtaaagttgtgactattattgtaacttttacccagccagcttttactgtcactgtcttagttagggttaccattgctgtgaggaaacaccataatcagaagcatcttgaggaggaaagggtttattctgtttctgttgctatatcatagttaatcaccaaagaaagttgggaaaggaattcaaactggacaggaacctgaaaccaggagctatagagatgccatgaaagaatgttgcttgctggcttgctcattgtggcttgttcagcctgatttcttatagacctgtagttgtccttacctgggggacagcaacctagagtaagaagtccagggaggggaatggggacaggagaggagagagaatgaccacaagacaggattctgtccaagtggcaaattttatttttccaggctagcttatataatcagtagtatgggataaaggggagggggagaagaggccaagagccaggtgttagtttaagcaggatgttagaaaactatagaaaaaggatgttggcagggtaaaaagttcatgggtggtggggagagggagggttacctaggtaagtggttggatgcaggagggttgcttaggtaagtggacctgtgcttggaacaaaggattgacatctgggtcatgttgttccttttgggtgctcatgtttgaagtcatttataatcaaaagccagttctataactatgtggcttgccaagtttgacctaaaggttcatgccaagctgtatggctcctaacatagaacccagaatcaccaggcctccaagtgcaccatccacaatgggctgggcctccccaattagtcattaaatgaaatgcccaatacatttgcctacagccaagtcttataaatgctgtggtagtttgagtaacaaaggtcccataggctcatagggactgacactattagcagatatgctttttttagagtattatgggctgtgatgtttcagatgcttacactacatccagtgtgtgtctcttcatgctgcctgcctatagagatatagaactctcagctacctctccagcaccatgtttgcctttgtgcttccatgcttctttccatgaggacaatgtactaaacctctgaactgtaagccatccccagttaaatgttttcatttataagaattactctggtcattgtatctcttcacagcaatagaaacactattttcttaagtgagattccctcctctcacgtgacttcaggttttctcaagttgacataaaaccaccaacatagacacctagatggcatctcttcaatgaagtgtatgtccattctgtccattttactccctttgatctgtaaaccacaaaaacgagtcaggcttctgcagaggtctgacctgtgtcagtcccaggctagagaggccatctattcaggactgatgtctttgggactgtgatcagaatcagccgaaaagccacaggtccaatcctgaagcagtgagtgtggatcaggaagtcctagcttcccaacattgttaaggatgagagagacatattatcacctcaggagggctttcattcagtactggacaccatggtttattcaagcatcctcttaaataactttccaaatgtgagggaaccgtagacgacatctattatcatgtataaacggctgactaggaaacacttcctaggaaggtatggtcccagaacacaggtacatgaacactcagacattccataatggcacatctcactagttcctcattagtccccaggcatgtcctaccagcccccatgatgcctgtgcgtccacccaggggcctaagtctattgttacacaactgagaagccattctccactgtggccaagccatctggtggtaaccagctgacatctaaaagacagtgggagattgatttgaactcctggaattgagcttgaggcctggatctgaaacatcgtatttatattcatgccccaacaggcttctggctttcttttagttgacaaaactggtcagcttgtatcaggcttttggtgacagactagatataatagataacttaagtttgacatgtttgacagaaaaggatatgatagaagaaagtaactgtcttggagagtgaatggagcacgtaaacagtgaacaagtccaagcctgtggcaataaccggtcaaaccacaaagtaacatgataggaaatacaaatcataattaaggagaaggaggttccagaaaaaaaaaaaaaacaagagttctttctccaagaactgatagaaaaatgaaagacactaaactctctcaaagactgaaaacatgtatgtaaggaagtgtgtgtctttgaagagatggtaagtggaggaaatatggtcataacacatatgaatttcttaaaggactaataaataaggaacaactttcattttatttttgtttctcttcctaattttcatgagtatattaaaaagttgttcctcatgccattttaatttttgtctaaattcattttaagaaagtgacacctaacactaacatgtcttggaacatatgtttcattttattaaaactttaacaggaataatgacaggaaaattcctcttagacatgtttttagtctcaatgaagagaattaacaagctgttctttctatccttggtggaaataagcccaactaagaaactacttcttttcatgcaggtgcataactgtataccaagtataattacatccaaagccatacacatcataactctattttttgttagaaaattctctctaaggatagcactgttgagtaaaaacagctgctgagctcaactttttaatatttaaaagtgctaaccatttattctgtttatggaaccacagctgagcctgtcacctatggcagatacaaatacactcatgttgatttggcaaacattatcagaatggctgtgtgctggtgcttggatgtttactctccccccaaaattataaaataaaatagattccacaagtgtatatgctacttgaacaatttcttagctcatgccaccaattttaaagtaatttttatttaaatagtcttcaatgattctaggttagcgtcttctccaatagaatgttggatccaggagaaccatatttttttttctcacataacatagcagactctgtgactttcaaaggacttgaaacataacagggatataaagaaaagtgtcctaagaatggtgtagtgggatgagaagtacttttccttggcttatcatgacaattttgaaagactagttgagaatgcctatgtaacatgtctgaaatagagaaagcactctactcatgattcatatccatctaaaatacaccatgaggagtacatattgtgcttctaataccaatggccagaattctcagcatagaccaggtaaaacttactgtagctacatacctggacacagttgagttatgtgagagcattttgatgtatttagatttgtttttactagtcatgaaattgcatgatggtaatcccagtagcaagggacctgaagcaggggaataaccaggaatattatgtgagcctgtccaacagagcaaaattctgtttagagtttggtagccaggggtgggaacattatgatctcttgagtctttattccaagagctggcagataagcttctctccaaagctggagggaaaagacctaattgctatagctaggttaaatggatcaccatgacttttttgttttttgtttttgctttcatattgggattttttatttaaattctttaattaccactcatatatacatatctatcccccctattccctggccctctcatcctcccaaattctccaccaactcccccaacccattccccaactccaccccagggacagtgaagccctccaccagggaccttcaaagtctgtcatatcctttgggggagagcccaggccttccttgttgtatctgtactgcaacagtatccctccatggggactgagctcccaaagtccatttgtgctctagggttgaagactggctccactgttaaaggttccataaactactctggcctcctagcaggcaccgacattcagaggacttggttcagtccagtgctgtttctacagctttgtgactagcgtctccatgctctcactaggtcaggtcaactgtttcagcaggtctttccatccctgtcttggctcctttgctcatccctcctccctctccacaactgaattccagcattatggttcagtgcatagttgtgggtgcctgtttctgcttcgaacagctactggatgaatgctctatgaatggtaaccaaggtagacaccaatctcattagaggggaagggcatcaatggcattttcttcaccaatgcttggattcttagttggggtcatccctgtggatcccctaatgtttcctttgtgccagacctctctccatacctgtactgtctccctctatcattattgaaaatgaatataatatattatgatcatggtttcttttcccccatccccttccagatcctcatcccctctctaccaatccaactccacacatcgtttctctctctatggaaaacaaataggaaaatacagataaaaagaaaagcaaaaacaagaaaaaagcaaaagaagtacacacatactgacagacagataaacacagacattgacacatacttatgcacacacacatgcacaaaccaaaatcacagaaacatcaaacagaagacacaatatacacacaaaagagaagtgtgataaaatatgttaaaaaacccattagagaaaattctacaaaaatacttctgagtttattttgtgttgcccatttatttctgggtatgaaaactaccttattgtgagtttatagacagtgagactacataggagaaaacttttttcctttgcaagtgtatggcaattgcagataatatcttaattaggaatggtagatcatgtccacttctccctatcatcactaggaacttgtctcacttagacctatcctggttctatgcatgctgccagtgtctctgtgaattcttttgtctatctgtcctgttgtgtctggaagacactatgtttttggtatcttcaattctggttgactcttgcaatctttttgcatcctcatctgaatagctctgtgagccttgaaaggaggggtttgatgaatatatcaaatttaaaatggagtgttctagggtctctgactctctgtatacattctagttgtgggtctttttgttatttcccattgacttcaagaagcttctctgatgataactaactgaaatggaattctttgcctaatctccagcaatttctcactacttgtaatcacaatgttctgctgaaagtccatcttccagcaagtttttgtctctctacatcttctttaaggttttcaactaaatggcatgatacacatctcagtcatgctcaactcagggaatctataggccccttcctatgtggatgagggcaaatggcttgagagatctatccaggagtaaagagcccatgtgaataataagacagtatagtgaaaaggagaatatgaagcaaggagatgtggaaagattggtataagtaaacagaaggaaagacctcgagaaagaagactacaaggagatggagagagagaaggagagggaggaagaaaaaggaagggggagataggaacttgactaacatagattgttggaagaaattacaactacatcattgggatataacaagatgcactgagaaaatgaacttctggatttcatatttctaaaaacaagtttcatcatgtgattttatagataattagtatgaagggaaatagagagtgtgtgtgcatcaaatttaagccaaatagccactgacacctttcaaagagttttccttgatggtaaagtatttgacatgtttcaaagctatatttcaaggccaagtttgaggaatattttcctaaaatgtattctgtatgattctaaaacatctgaggttcctcctattcacaaaagaaaaaacaaaaacaacccagagttgtaaactgctagaattctacacaatctacttgtttttatcacagtctactgcttgctaattgtccatcaaagggtggaggttggcagtagctttcttgcagatcagcagataaagcaggatttcccacaggtgattacaacaaggagtccctagccttcaacaggaaaatccatattgacaacttgccactggcctcagggctgaacctaattagtggagcctcatttcccaaaataaattaattcaatctacacatggcttaaaataactgaattgttctagaccaattttaaaaaactctcatgacaactaattggctgagactatagagtcttgtcaggtttccctatatataggacatatttaaaagtcaaggcaacctattatgataaatttaagtcacacccttcccattcttactgttactttaacaaataagtttatctcccacttctttttcaagcaccaaaactaacgatgtactttgagactattgatatgtgaactgttatgtacctgattgcacaatatttctggtatataaaatactatgtgtctactgccatagcactgtaaaatactagtgttaattcttggagaatttcttcttttttcatttttttaaatttaatttagaaacaagcatgttttacatgtcaatcccagttccctctccctcccatcctgccctggccaccaacaatcccttatccccatccacttactgctcccccaagaatgagacctttcatgggggatcttcaatgtttgtcacatcatttagagcatggcctaggctttcccctgagagagtatccctcaatgtggaatgggttcccaaagtccattcatatagtagggataaatactgatccactgctggaggccccaaagattgccatggcctccaaactgacacccatgttcaggaggtctggctcagttctatgctggtttcccagctgtcagtttggggtccatgaactcccccttgttcaggtcagctgtttctgtgggtttctccagcttggtcttgactcctttcctcatactcctccctctctgaaactagattccaggagttcagctcagtgtttagctgtgtttgtcttcttgtgcttgcaccaactactggatgaagactctaggatgacatacaaggtagtaatcaatctgattattggggaagggcatttagggtagcctctccactattgcttagattgttagttggtgtaatccgtataattctctggacatttccctagaaacagatttttctttaaacctataatagctccctctattatggtatctcttttcttttttaatatttttattgcagaacaacttattttacatattaatccccccatttcctcacactcccatcctcccattctccccactgacccatacaaaccaacccccccacttactccccaaggatagtaaagccttccatgggtaacacccaagtctgatacatcatttgggggaggtcctaggtcctcttttgagttactggactacaatagtgtccctcaatagtgtcccaaaatccatttgtgcactatggataactactggcatcactcttagagggcgcatagactgcccaggtctcctagctggcactcacattcagagggcttgttttggtccaatgctttggatcactgaacattttcctagtgccagttttctcttaaaacttatacaatctcaccgtattaaggtatctctctttttgttctcctctattcttccccagaatcaaacttcctgctccctaatgtcctccacttcccacctctcccctccttctttttctcctaactccctcttccctccccacatgctcccaaagtgctcaggagatcttgtcactatcgccttctcagggggaccatgcatggctctctcagagtcctctatgtttcctagcttctctggaagtgtggattttaggctggtaatcctttgctctatgtctaaaatccatatatgagtgagtacataccacatttacctttttctgactgggttacctcactcaggatggtttctactagttctgttcatttgactgtgaatttcaagggtccatttttttttttctgctgagtagtactcccttgtgtaaatgtatccaattttctttgttcttcggttctgcaggttactcccaggttgtggctgttacaaataatgctataaacatagataaacagatgtccttgttgtatgaatatgtgaatgttttgatactttcctgagagtggaactgctgaatcttgtggtagactgattcccattttcttcaggaaccgctatattgatttccaaagtggctgtactagttggcactcccactagtaatggaggaaccttcccctttctccacatcctctctagcataaactgtcactggtgattttgattttagccagttctgacaggagtaagatggtatctcagagttgttttgatttgcatttccatgatggctaaggatgttgaaaattttcttaagtatctttcagccattttatatttctctattagaaattctctacttagttctattcctcactttttagtttcattatttggtgttttgttgactagctttttgagtgattggtatattttggaaatcaaccctctgtcagatgtgggattggtgaatattttttcccattctgtgggctgccgtttagtattcttgactgggtcctttgccttacagaagcttctcagtttcaggaggtcccatttattacttgttgatctcaatgtctctgctactgtcattatgttcaggaagtggtctcctgtgcctattcgttcaagggtacctcctagtttctcttctaagagtttcagtgtggctggatgtatgttgaggactttgatacatttggacttaagttttgtgcaaggtgatagacatggatctatttacagtcatctacatgccatcatctagttatacctgcacaatttgttgtagagaatattcttttttctattatttaattttagcttctttgtcaaaaatcaggtattcataggtgtatgggttaatatcagggttttcaattttattgccttggtctacttgtctgcttttatgccaataccaagttgttttcaggactatagttctaaaatagagctggaagtcagggatggtaatgcctctggaggtttttgtattacacaaggttgttttggctatcctgggtcttttgttttccatataaagttgagtattattctttcaatatctgtgaataattttgccattattttgatggatgttgcattgaatctgtaaattacttttactatgttcttcctacctactcaagagcatgggagatctttcaattttctggtatcttctttaattattttttccttaaagatgctatgttcttgctatacaggtctttcttttatcctgccacttttgctaaaggtgtttttcagctgtaatagttccctggtagagtttttcagatcacttatgtaaactatcctatcatctgcaaatttgacttcttcctttccaattttatctccttttgttgtcttattgctctggcaagcacttcaagaacaatattgaagagatatggagagagtggacagtcttgtcttgtgcctgattttagaggaataacattgattttctctccatttacgttgatgctgcctgttggtttgctatatatcgcttttcttatgtttaggtgtgttcctgttatccctgatccctccaaggcctgtatcattaagggatgttggtttttgtcaaaagctttttcagcatttagtgagatgatttgtaaatggagtccttaattggtctaaataataaaaggccggagtctgatatagagggaaatgctgagatatcagagagaaggagtaaaccacagcaaaccttacttcttaaatgtctccacagagaagagtgagttcctgttcattcctgattatacactgttcctgcccagctatattacttcatgtctgtctttatagacctccagacctctatggttagctagtggcaagctccattgtctgctccccagacatgccttatttgtgcaagaaaaatatcatgacatatccccttttggtctaaaaaataacataaattataaccaatatgagaaaattatctacaataagaaaaataactatatacaatatatacatggtcataactacattgtctagtccatagccatatgacaaattcctagaaaataccccattatctattttttcttgatgagtccaaaatattgtacctaatttactgtctattctaagatgcatatcaaattatcttttaatttcttttaaacccattacatttaatacaactatagtaagtttctttactggttctggtaaatagggaaaactataactatactattttttcttcattttcctcagagactcaagagaaaataatattaactgagtaaacaggaagtgtaagcaagcaactttcaaagaatgtgagaaatgacagaaacagctggctgcctggagagcacccaagattgctctgcaatggtgggtcaattattattgccatcttatcattcttacacaatgatcatgtgattttatttttcagcttatttatatgatggattgcattaatagactttcatatgttaaaacatcccttcataccaaggatgaagcctacttgatcatgatggataatttctctgttgtgttcttggattcaatttgccaaaattttattgaatatatttgcataaatgttcatgagggatattggtctgtagttctctttcttaattgtgtctttgtttggctagggtaccaaagtgattgtagcatcataagaagagtttggcaatgaactttctggttataatgtatgaaagaattttgaggagtattggtattatctcttttttgaatttctggtacaatcctgccacataatcactattttgtaatcactttacaatgaaggaagtttggactcagagaaagtgaggaactatgtagaattctgtgtttgcattaacgtctcctccctgactccaagatttaaatgtttccatgttgacattcttcctttaattctattgtcagctagagtagatttaaacaaaacagaagtctctgcttgatagatctccattgttcttatttttatctagtatgttgtatagtacaaagataaaaattcaacatattttcttcaattcatgcaacattttcagtatttcacatgtgaagaatattttcctaaaatagacccagaaagtgtttttcttctatgattcctttgtgctttcataaactagtgtaatggagtattgtaatagagtccatgaaagcccagataaagggaagtcaagtatttattggggaatcactcagaaatgacaaaacaaggtcccctgaccttatgttctggttgctgccatgtattccattgttgggagctgcaaagtacggcgcccaaaagatggcgctagtttccgccttccgccagcccgacgtcgagtgctctctgtggtaaacaactcctaatttggtaaaggccatgtatcctcttaattctgcttggagacaacctatcctggcgtaccacgtagggttaggtgattggtaggtgtagactatatcagaccccgtcttcctctacctggggccgccattcactgtaaatcatggttcccgattaaactgtgagaagaaggttccttggtgttgtgtcgttcttgctggtcaagggtggacgcaacattccatgaccggagaaagagagcgctcacatcccagtctgcccatagcacctgagagcctgaaaaactccaccttgaggagttgaatgagtttccacagcaattctccttttagtccaaagaagagggttctaaacctaatacaaaactatatacaataagaataattatcaagtaatgtccaggaaaagggtaaaaaataacatccacaaaattagtactataaccgacaagaatatcatcaagcaagaaaaaccaacagagtgtccatgctaatggcaattggcaaataacagagattattccaacagatgcgctatcctgaggagtctgagtgttttacctaaatgtcttcactaaggatagtagctgaaactatatagtattcaactccattaaagtcctgagagggaacataatattacctgagttagcaggaagagccaacaggcaacttcttaaaagtgcaggaactgaaagaaacagctggctacatagacattcatctaaatcctgccaaaaatgttggggcaaccaactttttctaaggcctagaatatctgatagaccattttcagaagcagaaagattcaaaagattgtcctaccgtgtcttggcaaggttcagctttctctttttgcttatatcctgcttgtctagttaggacagcttgtccattgacagcagttgaggcaagggtagttctttgccccatatgccagttttaccaagaagtaaacaaactccaacacttgggaatagctcggcattatcagaagcagtcatgtctcatgtcaacagggttctaaactattaaaatattaaaagctatattctgtaggtctttgaaatatttgaagattatctatgtatgtggagtacatctctgtgtatctaggaaacataatttacataactaggtaccacaaatgcaagtaactataacctttaattctcaataacacttactgactaaagcttaacatataaaaacaaacaatctttaaacaccatgagggacaatgatctcaaacaattataataataataatatataactatcttgaattaaaggtagacatttgtagtgcaatgtataaaaatatcctaaaatttcatcaatatacaaaatatcttaagcatatgcagaaatgtacatccgtataatagggcaaaataattttacattagtatttaaaaaacattataaacagaaagaacacataaaaataatataatttcaactttatatgaatatacaaattatcttaggaatgtaaaattaattttatgtatcaatatacaagaatctgcaatcaatgtaaattgtctaactaataattcctgaaataatacatgagtagatacactaatttaactattgtcccattctatacattctgctctttccaaagattattggctgaattagttccaacaacagattagtcagttaacttttccattccctgaacatttctctttgacttggtcatggtgactcacatatggaagtcaggattgatataatgatgacttaaaggatgactatatgaactcattaacttttgttcaaaaagttgaataatataattttatgtatactaattttgcattgcaattatctttggaattacttcttaacacccaaatgataaaaaatagttctttgagtcaaagatgtctattcatctataattgatagaactaaaagtgatacatattgaaggagtcagatggcaccattgatcatatatgtcttgttcaaaacaaagacagaataaagactgctatttatgtaaatagaatcagtttaacatatacatgttatgcatcaatatttaacctgtttatttctaaaatagaatatattttggtatatttatccatttgaatttaaatttgaatttaaaacacagtaaagattgacaaatgtaactaataaaaattcttgtctttatataaaatttgaaatatgtaataaaaacaatggaaacagttttcagagtaaagagacaccttgttgtatagttattctttaacagtgactaatttgcttctgaaacacgatcaaatcacttgcctcagtactcaggaaactctgatggagaggatgcagaaataatttaagagccagagggggttgaggacaccaaaacaaacaaacaaacaagcaataaacaacaaacaaaaaaaaaacaaggatggatgcacatatgaactcacagagcataaggtagcataaaaagcgtctatatgggtctgtacagatgggtcatagagcttaaaggagaagtgaactcacaccccaattgtaatccagaggctatctctcttttgctaaccacttgtaaatggaaaattagttttttccaagggtgtcttactagagaaacaagtgactcttaagggtaggccagtattctcagcagtagatggccaacagaaaatgaactcagctgtacctttggagcttccttgcctcacaatctcataccaaagctttaaaaacaaaagccaaacaaaaaaccatatattttccagggcctttgcatacatattgtgacttctagttagtatttatgggattcctaagagggacaaatgagtgggtctgtatctgtttcatttgccttttccttgggctcttttccttctgtttgttttgctctattctaatgtgttagcttttattttatccttttattttcttatttttttattatccactacaaatgctttgttttctaatgagaggcagaaaatgagttgatttggatgggaggggaggttggagagagtagaggagagagaaattgtaatcaggatatattatatgacaaaaagtatctattttcaataaaaggaaaagaaataaaagttaaaacctcctttccaaagaagaaggaacaataaggctgctcccacacttttaattcattggcattattgctttaatgttgtttcttggttacagtagatagattataaagctgctccaaggatagctttctttcattacatcctactcaagatgtcacttcaaaaattagccactcactttcatgcatgataaaatttccctttctgtttaataatttccatcaggctataacacacatcaacgtctattttccatagaagtgaagtagccacgtgtttaggagttatccaccactccagtaagcagaatgtcttcggtacatgactggttagtgttcaaacttcatttctgttgctctaacagaaagcaacactgggcagaaaagttttattgagatcacaatttcaagttgatgtcaatcatttagggaaagtcaaggcaggaaatttaacagctactcagacaggaaagatcatgagacagtaggtcataccaaattcacagtcaagagaatcaagaacataaatgcaaaagtgtattcttgcttcttgcttaacactcagctttgtctactaacttgaagtccagtgaccattccattgaaaggtactgcctacatttaggatctttcacttcaaatgaaactgaagaccatctcagacatcagagcccacaaactagccttgtctagcaagtttctcaactgaggcttctcaggtggttctgtactttgagaagatgcaaattaataacttaactacacagctacttaaaatggatttatttccacagataagaacatagggccacaatagcataaggtttactggagctagccttccagaacttagagaagattcttcactcacatgaaatcttgcttggacatatgccactactgagggatccaaaaacaagacattcagtacagatgggagtctatgggttataccatgaaagggagggaagctgaaaagaagatgaggtttttcaggaagttcccttcattttggaatagcgcattttcaaaatatttctgtaactgcaagtaggacggaggcacttggttggtctacttgagatctgtaaaatcatctgagacaatgaggagatactgcctcctatcagttctttattttgttcaagaagtctttttctagactctttcctcatctaagtgcctataattaactgtaattccatgtttactttacacaaattattatacatatcatagatattatcctttacaagtatgcactgtgaacttagtcatatacctatgggcttagtactcaattgatcaattatgcttttcattgcttacatttaatctatctaatgctatcaatttacatctgttaaattgtattccatttgtgtgtgcttagtgttttactgccttccttttatgtttactttcacatttaatgtcactggaaagcttaatcaatcttcacaagtgtccgattttaatcagcctagacactgtagctcacagtacttttcatacctgtgaatttattctacctgataatttttttttaatttttcaaggttgttgtatccccctgtctctgatagcagacaagcatgactgttcctttatcttggtactggctcactgctcaaaggctatatttggtgaaggaacttttgggattttatttgtgtgaaactttttattggttacctgcccagtcattatttcgttcatattgtttcctgtttaattctttgtccaaaattgtatgtttggagaggtgtgtatgcctgagtgcaggtatatgaagaagtcagaacaaggcattggattccaaagaaattctggtgtgagtcaccatatgtcgttgctaggaatcaaccccacttcttctgcaacagcagaatgtgctcttaacaattaagacttttttctagctcttaataatactttcctcataggtgaaaaactgaaaattttactttattttattttacaatttttcttttatgtaatttttataagtagttggaatttaacatattggtcaagatatttatgtgttcttcacagttattaatttctagtaatatgttttctgagaaccaagtctaattttgtgataaggggaaagagacaagatctcttgagcaaattgggagcatggggggagggaagaaagagttccttaatgatgacttccttatatgccatcctagagcctttatccagtagctgatggaagcagaagcagacacccacagataaacactgagctgaactcctggaataatgttatagagagggaggagattagcaaaggggtcaagaccaggctagagaaacccacagaaacaactgacctgaacaagggagagatgataggccccaaactgatagctaggaaaccagattagtactaacccagaacccctgtatgcaggagtcagttaggaggcctgggaaaactatgggaactctagtagtagatcaatatttatccatagtataggaatggattttcagggcccattccacatagagggatactctctcagcctagacacaagagggaggggctaggtcctgctccaaatgatatgaaataattttaagattcccccatggaaggcctcaccctccctggggagcagaaaagggatgggatagggagttgatgggcgcagggaaggaggggagggagagggaactgggattgacatttacaacaagcttgtttctaatttaaatttaaaaaggagataaaaaggaacaataaagaaacaaacaaacaaataaataaataaataaataaataaataaataaaagtagataccccaccaaaaaggaaaaccaagtgaatttgctctgtgtgctaaatctttgcatttttctaaaagattcagcattaatttaaatgttctttttcactattgtggcattgttattcatttacatgtatgttataccataaatattccatatattttctaacaccattatctgatggttctcgaaatatttatcaaataaaactctgttctctgtagtctggagctgtacccatgtgatttgtatgtgtgtgcatacgagtatgtgactgatttcattcatattttgttattagttaattctacttttttgttgttgttgtttttgttttttgttttttgagacagggtttctctgtggcttttggaggctgtcctggaactagctcttgtagaccaggctggtctcaaactcgtagagatctgcctgcctttgcctcccaaatgctggaattaaaggcatgtgccaccaatgcccagtggtgttaattctacttttatagacctaattttattcagtttcctctatgtttgatattcaagtctaggaagcatattttttctaaaccattataaagggacagtttatgaataggtgatggaatttcctgtataattgcccattaaatcacagggcatctctatcatagtaaattatgctattacacattcacatagacattgtcttctacccattagttatataaagcaagtaaatgagcccttttaagataacttcttataatttcaatttctaaattgtatttgactgctcaaattctctttttccctaagtaagtcagttgagatttcttagtttatactaggcccttccatcttacttcaagttttaaaattaaggcttaatcatagactgtttactgtagcaaaataaaggagttgattaaacttcttctgcttaaatatataagaaactaacagcaacaaaatacaatgaacaagtggcgactaatgtctgttactgtagaactgccctgtaaatttgagggcattctgggctctgtatttgagtactagattagacagaattgcatagaacgatcctgtcaaaaatgacaccaaaccaaaatatacaaaacaaggcacaacaaatccccagtttgtatagaattaaatagatagttccagaaaggaaaaactccttggcaggccatttatacaacattaaaaatttataaattggaaaaaagtacaccatctcaaagttatagttctaggttctccatagttctatttggttataattttaaagttatatttacaaatgaaagcaagaattttaattaaatactaatgatgcttgaatcacacctaaattatatgttatttttgtagtttgtagagcatagtttttttgttttgttttattttgtttttgttttttggctttggctgagaacaaaggcttaaagcagtaagtttattaagtggtgaaaattattataaaattcagatacctgtaggtgaagtacagatgaagctgagaatcattacagactcaactcagatatcatctgtgttattttaggtgttctctttacaacaaaagagaggttccatgacaattttgtatgcttgttactacaaaacaagagatgtttctaatactcatctagttacttagcatatataaattttgttgcattcttgacagcaatagtccatgtttatttgatataagcattggtagacaaagcagatatacctatctaaaaatattcaggagctggggacagagctcagtcattaagagtactgttgttcttcaaggggacagaggtcagttacagcatcaatgtcagaaaatacataattatctataactccagccttggtggatctgacacactttttatgcaaacacccatgcatgagtcccacacagccaaaaagacaagtagatatgtagataaatgaagctaaataaattaaaaaaattgtgtatgtaagttatttttccttacaaacagcaggagtttgtatttcagtatgtctgacattaacatacttacaaagagacctgactatctcacttatttttccaaaaacagttcatgtgttcccctgggcacagtggcactgtcctgtaattcaagcaatggatggctgggaaaggactcatggatggatgccagtctgggccctgcaggaaatttcaagtgaacttgagaattttcaagacactttcacaaaattagagtttaaaaagtagctaaaataaaaaacaccaatgacagtttatgctggtgaggatctgaagaaaggggaacactcctccattgctggtgggaacgcaaacttgtacagccactttggaaatcgatacggtggttgcttaggaaaatgggaatcagtctacctcaagatcaaacaattccactcttaggcatatacacaaatgatgcacactcataccactaggacatctgttcaactatgtacatgacagtattatttgtaaaggccagaacctggaagcaacctagatgcctgtcaaccaaagaatggataaagaaaatgtggtatgtttacacaatggcataatactcagtggaaaaaaaaaaacaatgaaatgttgaaattttcaggcaaatggctagaactagaagaaaccatccttagcaaggtaacccagtcacagaaagacaaacatggtatgtactcacttgtaagtggatgttagacatagagcaaaggatagccagcctacaatccacaatcccagagaagtgaggaacctaatagaaacatatatggtccctccagagaaagggaaagggacaacatctcctgagtaaattgggagcatgggggtgtgggggaaaggagaaagaggatggaagaacaagaagggggcagagaacataagggatcaggaaggtcgagatgggcaaagaacagagaaagacagcaagaaaagtgacaacttaatagagggaaccatttggggattaatgagaaatctggcactggggaaatgttcagggatctataaggatggccctagctaagaatctaagcagtaataggctaccttaaatgtctttcactataatgagaatgatgaccactttcaatgtcatgattgatccttcattcagtaggattaaagcagaagcagaagcagagattcacacctaagcagtgagcagaattcttagaatccagttgtagagaaggagcagtgatgagcaaaggggtcaagaccagagtgaggaaacccacagaaccaggtgacctaaaaaagtggatactcaatattctatataaatgcataactatgccagtttttcctaatattatattcaccaaaattgctcaaaagtaagacactatcaccattggtccctcctaccaaaacaaataaaaaattgacaggaaataccaccacagaaatgaaatgtattagatactcaaagaataataggttcagttatactatttcactgtgactttgaatttaatatctttgctcaaaataagttatataaagcactatgtagttttgaaagcagagtacccaaaacacaggactcaatccatgtacagcttggttaaaagctagcaattggttaagtttgcaaaaacacttccttccttataaatctaaactaataaggagaaacaatgtgggttagtgaaatgggtgcaaaagttatttaacaaattgccaagaaatctattcctccatgagtttcctatgaccttgaccctgtgccatccattcattcccttccctcaaatcacctcaaaaatactaagactcacaaaaggattctatctcaaaatacaaggaaaacatagctcgagaaagtatattcacaccacaagtttctcagtattaagtataaaccatataaacatgaattttaaaattaagtttcatgaaaacaaaaagaaaggggtatcttcttcataagagagacataataagagagataggaagagcaatactctaggtttggaaaagttgtgtaaacaagcagtggataccatctgtgacatgtgaggctagggggaaagcaacagagagggtcctaggacattatgaaccacagagtcatatcttgtctctaatacaaataacaatgtacaaagtaacaaatacataaacacaaaataaacaataaacctttctagtaacacagaagacaaaatggaaattaaagcaagtgagaataagatattacagaaattagagcctggctggaagccttggttcttctctgattgccccaagtgagtcatctgctgccagcatgcattgtgccaaagccccttgctgccacaaggcttttgaaggaatgcctgtaatcctgtgttttgaacaagttcctgttttccagctgtaatcacacattagccacattcatttcccttccctgccactgctcctctgaaggaacttcaagtgtatcaccatgctaggagtcctccttgtgcccctggtacatggggagcagttaagtcagctgcatcatgaaacagtgatatttacagccatgctttgttagatagcatgctgtcagcccttgagccattagggtcctagctgttcttaagctcctcagaagaggaaacttaatataaacaccttggcagataccccatggaagagactaaggaatagtaacactggagtacagttctgcagcatgcacagaaatgccaagtgaatgtggtggcctgtttgcaattccactacttgggaggtaaagatacaagattctttgaacaaaatctcaacctagaaaagcataatcaacccacatggggttcaagtgtgaattagagccacaatatgtaaagtggacagacatctaggaaaacacccagtaccagattcaaacctcaatgcacacccccagacacatgagaatattcagatattcatacatatgcactatacatttgcactatagaaatggaaaccataatgtctgctatgccatgcaatggcttttactagctgctgttataaaaaaaaaaagaaggtatttcccctaaacatgcatgaacaaattacttatgtttcatcacagtgacactagtattattggatgtattggggaaaatgtagtgtataggaaatgattaagaaatctgtaattattttttgtaaatttgacaggattatgtaaatcaatagttctcaatgttctcagtgctgtgatccttgaaaagaggtcctcatgctttggtgaccccaactgtgaaattattttcttttctctttaataactggaatgttgctactgttgtgaattgtaatgtaactattgagaaagtcatgatttcaagaagaaaaatttattgatgcaactaccttctgaattaaatggggtgtgtacagttttattaattttctttcatttatctaaagacagcatttttcaaaaggtgtctgtagctcaaatctgtttgttttctgtataaccagtgtgtggagtcatcagatattctcagcaaaagtccaagccaaaaagcaagcatgatttatcccataaaattatttcctgatagtgtgtcctggccttgctctaggatgtcaatagctggtcttggcatgaggccttgaatacaaagatattcccctgatcacggccagcttcatagatcttaatctgtttgtgaatgtcttgtcatggttctctatcttccaaaagatgctgcctcccaaattatatagtcttacacacacaaaccatatcgacttcacacaccgcaaagggcatctagataaccctgacaaaggtggagctgctataaatttttaagagccttaactgtttgaatcagggactgtgatctatggtcctcagtcaaactattatggggtgggggattacacctgtaaagcaaagcttccttcactgctgcctctcaacttaggttaatgactcttggcatccgtgtaaagctttccagtgactactgatgcaggttataaaagagatgatggtctcttgttagaacaatttaacatcataagaaggccactaatgtatcatgacaaataacatcatggacttaagaggatatacaggtgcataaaaacttagagttggaaaataatttaaacatcacaactaataacatcacctttatgtatttcatttaaggaaagcttgctggtatgtatagttgtaacaataaatagttgtaaagaacctgaaacgttgtcctttctgcttaagaaaatgtggatttaaatagtgactgccataatactgttacatgaaaaagaattataacattcagtcaactatcactgcttaagcttatttttttgcctggcaagtagtgaataacattgcaggattgactaatctaacttataaattgtgaaaacttttggtacatgaaaatgaaataatgaattctgcagaacagaggaagtcatatgatttagtctcacactggatcaataaccttttggcttctattttatgtctgataacacattgtctctagaaatgttgaagaaaagcacattcactttcttgtctcactgagtatacttaatggcacatttggggaacaaacagataattggtctgaaaagtggatatggaattcaaaattaagtaagagatgaaagaaatacaatttataacaagggaatctgatcaggactagactaaagattcataagcagaatttgaagaaagtagacataaagtcatatggagggaggaacacaggcttaccggtggcagtgaagataaccaggatagtcctagttatctgacactatcctatccttggagttcacttctgatgaacttttgcttctaagaaagtgggcttgattttctgactcctaaaaatatataataaggcagtggtgacataaggaaagaccatgatgttcttatgagacaatcttaagtgtcttgctaactactgcagaaatcatgtattatgtggacttagtgaatctatgcattgaggctgcctttctcaagtacatgactttaaagcatttggatattcatgaaatacactgtgtgaccacatactgtgtctcttgaagcaaatacataagcatatgaacacataagcacattttatgtgtatacataaaatctaaaatggtaaaaatacaagtggcatatctttgcatccatacaaagacactgattctcactaagaagaaagtgcttcaggaatgtcaagaaggctgagttattaaatattttagagttatagttgaaaaactgaatgacggaagtgataaggtgtaacagtgacatgcaaaggtgaatacactcttaggatgtgagtgtgaaatgtcctacctaggcttacatttataaatgttttttgtcaccagatagtgacagccttgacagatcatctttcggaagcagggcatcactggaggaggtaggtgggtcattaagggcaaaagttgcctggacctccttcctataacacccctatgcttccttatttaacaagaagtaagcaagctccatcaaccacatttcagaatcagaattgttgccaggtcttttgtaccatgatggactctatccccttagactgtgagtcaaatgactatctccactttttgttgctttgggaaagtgttttgtctcaggatgagaaaagaaacattttcaaggttcaaaattgtgtttgatcaaaatatactgtatgcaattcttaaagaattgataaaaagtagtttaaaatttgcatccttgctttagacatggagatatatatttgtcacttgccctactggactataaatatgtcaagactctttttttaaacgtctccttagtatacttcacttaaataatatacaaacatttgatgaataatattgggctaccagtcatattagcatttttctgagtactccctgcagtgtgttgcaagtggtcaattaatatcatttaagttcaattataattgttatggatgaatactgaattttaactagttggaaaattatttttaagtttgttaattctatttacttacaaagaaagaatttatgtgctggagcctcaaaactttttcacccatgataatgtgtgtgagcaggagtggaatttccttcttttccaaattaaatgacatttatttattttattaattatttgcatttaattgcttttactagcattcacactgttatgtagaatacaagcagcgtaaccttatgtctgcaatgggctgatttccaaagttaaataaacatgcaatggagtagtacaagttcaagattcctaccagagaaccagattggctgacagcagattttcacctctaccaatgttaccccagaattaatccttaagtcacactcccagctctacatcagaacacccatggcagcttccaacaacaccatctctagtggatcccaaagattgcacccccaatgtatctctctccacttattgctttatcagagaccccaactggaataggtacttcttgctaacctgtagtgaagcaggtaggctgactatagctttttcattcaccttgtcttcctccagatccaatccccagttctcatcacaagaggtatagtagagcttctgggttgatgtttcttccctgtcaactcccattttaaggagactaaataagcctgttccagtggaatacttttcttttctccctcatgtgacccccctcagacaactaacctaacttcactcctaagtgtcagttcccaacacccagaaacacactgcatcctgaaccccagttggccacatctaccagctaaacagataattttctacagggcaacaaagagccaccaaactctcctaaactcaacaaagaaaattgaaataaagaaaaaaaatccacccaaataaaacaaaaacattaccaatacctagaactgtagtcttccaatattagatacctagacatcagcataaaaacattatcaataacaaccaggacaatatgtatccatttaggcctagcaaccctatcagtgcagaccctaaatgtaccaacatagctgaagcacaaaaaaagaccttaaaagagcctgtataaacaggaaagaggtccttaaaggggaaatgaataaatcctccaaagaaatccaggtaagcacaagaagtaggaagaaatgagtaaagcagttcaagaccttaaagtggaaatagaattattaagaaaacccaaactgagggaaatctgaaaatgaaaattttaggaattcaaacagaatctacagaggcaaccttcagcaacagaaaaaaagagatggaagaaaatttcaggcattgaacacacaataggaaatgttatatctaaagatatcccaacacaaatcaaacaggaaatacaggatttaatgaaaaacaaacctaagaataattgtaatggaggaaggagaggaaacccagctcaaaatcatcaaagaaagttcccctaacatacagaaacattcactcataagcgtacaggataccaaataggttgacaaaaaaaaaagaaagtcagtttgccataatacattccaaacattaaatgaggggaaaaaaagaaataatagcaaaaagataattaagagaaaagagaaaatcaacaggtaaaatagaaaggcagacctattaaaatacaccagtcttctcaatggagattctaaaatacaaaagagcctagtcagatatgctgtactgaaatcagtaaaagagaaacaaagaatgcaaagaattaataaaacagagtttgtgatttaagtaaaacagtaagattgatacatcaaaattaacaaaaaggtagagaaagaatatacaaattaacaaaatcagaaatgaaaggggataaaagagacacagaaatctagaatatataaaatgtgaactttaataacttatacttgaaaatttgggaaatgtaaagtaaatgaataattttgtcaataggtaccactaaccaatgttaaatccattccatataagaaatttaaacagacctgtaattcccagtgaaatataagcagttatgcaaatctcccaacctctgtctcccaacacggcccagagacaaatgttttaaacacaaaatactaccaagttttcaggagcagtcaatcccaatactcctctaattattttgctgagttcactttatgaggccaaagttaccttgctatctaaaccatataaagacaaagaaatcaaattacagaccagtttccctatgaagagtgatgtaaaaatactcagttaagtactatcaatccatgtccaatagcatatcaaaagaccattcaccattggataaagtaggcttcatcaaatagaagcagggatgttgtagcaaaaataataaaaacccagagacagatattgtgttaaagctgaagatcagagaagcaaagcagccagccagtagaaagttctcacctctactgatattcagaccaaagaggtgatctactgaatgccaaactgctcccaactgcgctgctgctcagactcactgagactacaatatgttcatgttccctcctgccttatactcccctccaatgcagccatatcattcctgtctccacctctccagtgctaggattaaaggtttgagctgtttcttttttagactgattcactcttgtgtagcccagtgtgaccttgaagtcacagaaacccatctgcctctgtcttctgagttctggtattaaagtatgttcaatatctttagctataagggagatgcaaatcaaaataactttgagattccatctgacacgtgccagatgtctaaggtaaaagcataagtgacaattcaagctggtgaggatatggatcaagaggagtgtaaactagtacagtcactgtggaaatcagtatggtggttcctcagaaaattgggaactgaactacctcaatatctatctacatcacttctggtcatataccaaaaggatgcttcatcctaccacaaggacacatgctcaaacatttcaattgcttttctattaataagagtcagaaattggaaacaatctaatgtagttcagcaaaagaatggataaagaaaattggtacatttgtacaatggagtatttttcatttgttaaaaaattacaacatggtatttgtagcaaaatggattcaagtaggaaacaaaactgagacccagaaatctaggtatgtcatatatttgcttatatgttgctattactcattaattacatgataaccaagctataagccctagatccagagaagtcaggtatagttgaagacaatagggaaggacacatggatctcctggagaaagggaattagactagattttttgggtgtactgggggtttggaagacaagaacagacaatctggtgtgaaaagggaaggcatatggaataagggaggaaatttggaaagaggcaattagaattgaggggtgtatagaaatatgtacagtgggagctttctaaaacaaatgaaggtgatcctaatgaagtctctaaatataattcatagaaccacagaatttaggtataatctagccatacttaaactcttagaagagaaagtgggaggtacccttgaaggaattgatacaggatacaacttcctgaacataacactagtagcacagacactgagatcaacaattaataaatgggacctcaggaaaatgagaagtttctgtaaggcaaaggacacagtcagcaagacaaaatgtcatccaacagaatgggaaaagaacttcatcaaccccacatctgacagagagctgatttccaaaatatacaatgatctcaataagctagccaccaaaaaaaccaaacaacacaattaaaaagagggctgcagaatgaaatagaaaattctcaacagaggaatctaaaatggctaaatgacacttaagaaattggtcaccattgttagccattagggaagtgcaactcaaaacaagtctgagatgcaatcttacactggccagaatggctaaaataaaaaaaaaaaaaaaacaccaatgacaggctatgctggagaggatatggagaaagaggaacactcctacatttctagtgggagtgcaaacttacgtgactacttcagaaatcagtatggcattttctcaagaaaatgggaatcagtctaacacaagatccagcaattgctctcttgggcatatacccaaagaacgcacattcatacaataaggatatatgttcaactgtgttcatagcagcattgtttttaatagccagatcctggaagcaacctagatgcccctcaactgatgaatggatagagaaaatgtggtacatttacacatggagtactactcagtggaaaaaaaacacacaacaatggaatcttgaaattcacagaccaatggatggaactagaagcaaccatcctggtcaaggtaactcagtcacaaaaagataaatatggtatgtactcactcatatatttattttagacatatacatgggctttccagtttacaattcacactgccagaagagctaggaatcaaggaggaccccaagagaagaatgcatggtgcttcgaagaaggagaagggaacaagaacccctgagcaaattgggagcataggggtgataggaagaaggtgggaaggggagaggaggagaagaggttgggggagaacaggaggactgagatagggcaagaaaggagatgccatgatagagggagactgtacaggtttggagagaggtttggcacaggggaagtgttaggggatccacagggatgaccccaactaagaatcttggcagtggtggagaggctgcctttgatgtccttcctctataatgagactgatgattaccttgtttaccatccctagaaccttcatccagtagctgatcgaaacagaaacagacacccacggctaaaaactgagccatactcctggaacccagttgcggagagggaggagggatgagcaaggaagccaagacggtgctggagtaactcacagaaacaagtgaccttacctagtgagagcaaagtgaccttagttgtaaagctggagaaccagcattgaacagaacaaagcccttggaatgtgggtgacagctaggaagacaagacagtctatgggacttctaacagtagagccagtgtttatccctagagcacaaattgaatttaggagcccattccctgtggagggatactattacagcccagatccaggaaggagggcctgggcccttccccacatgatgtgatagcctttgaaggttccatggaggtcctcactaccccttgagagggggtggaggatgggtagtggggttgaggagcatgggagaaatggagggcgagggaatgagatgatagatatgtaaataagagtgcttctaaaataataaaagtaaaaataaaataaattaaaaagataaaattcacaaaacagaaatgttttcttagcttaatatatacattaataggattaattaggaaaacatactaattatgaaaatcaatgaattcttatttgctggaaaagtgagcatgcattcatcccctaataataatgtcctcatagcaccatgttctcgcagtggaaaatgctaatattcagtatggaaaagacagaattagctgctcacactcacataatatttccttacactcatgtattatttctactccctaatcttttgttttgtttggaaattcagctagatacataagtcaacgttttagtctatgagtttcgtagctatccttcatgccagtaactcactgttttattcacttgtcagatgagtgccataagcaagaactaggaacgacagctccactcctcctcaggatcatctcagcaattctttatcaacagttgtaagatatctacttattaaaacagaatctatctgaaatgtaatacagcaaaggtttggaggaattgaatttctcatgtaagaaatataagatagtttttcacctttcaaatgtattccaatgatgatgaaaataagaaaatcacagtgtgaaatgggaaggtgtcatcataacttagcacaaagaaccagaatattttcccctttgttcttataagtcatatttatacaattcaatgtgatggtaaataattgaataaattctagttttccactagtggaatacacatgaaaaacagagaaactaaattatataagtaatgtgcataaaacacataatgtatgtgtattcttttactcttttgcagtaaaacatttcttcttattttatactttatacagttggtagttcatagttacacagatatagcctaatggaatgaataacataaattttgatattgtatatgaattattgcatacttacagaggttatcaataggctggctcatgtttttttactctatttgaatagaaatcacacctttggtatgtgattcttcttttgttcatgttcttggctttaatactctgaagattttggggatattcttactcattaggctgggagctgcaggccttcaaaactacagacatcagccagtggacattgagacacaggaactcctatctctaggtgcacaggtaaaagcccatgacattcacttgagaagagaatattaggctgtaggcagcaactgcagacatcagcaaatggccacagcaaacatcaaccaatgttacattgccccattgctctggttttaatgcttttcatcctttatagaagctgttatgtagttctagagactctggtattttgacccttggttttcaaatcctggatattcccaaatacttttcaagaaaatagggcttctaacccagcactttctgttttctggggtcaactgtcttgactttcttttctgtggccttctctgtgttttgatcatcatcatttctttatcatttgcttcctggaacaactgccatggctactttatggaattctttagctgatttatgctacctcaggcttaggactttgcttctgtctattgctctttttggcttttgcatccaatcctccttctgtctctccatgtttgctgcctatgatgctggtcctcttcatgataacagtatattcatgcttcactccaagtaatagcataacattcagaagaggtcaatcattaaacataaatttgcgtcattaagaactaacacagaatgtagctcaaaatatctgaaaagtgagttgaacagtaaatagaggcataacatgggttagggttcccatgggaaaaacatatatatgtatatatacatgtatgtgtgtgtgtgtgtgtgtgagagagagagagagagagagagagagagagagagagacagacagacagacagacagacagacagacagagaggctgtcggccaactagtataagaatgtgtatctctctacagaaggttcaagatgctaatagttgttcagttcacaaggttggatgtctcagattgtctttagtatagatagacattgagtgaaggagtgcctcagtagcagggagtgaagtcaagtgagcaaagagcaaaagcttctttttgctgctaccatatgctgtagcctagataaaggatggggcttcccaactcaaataatccaatcgagaatactccctagcaggtatatttacctgcttgtgtttagatgtaatcaggttaacaaccaagaatagaatagtcttcacattagaaacataaatgaatatttgaatttgcaccaatcatagaacatcttctaaatatatccatcacagtttacacatcaagacagatcacagaactttaacaaacatacaatttcagttatgcactagataaatcatgggatttctcttgtgtcactcacagaactattccccttcttggtggactaggaagggtttcagagtgagtacttagaagaacttcaagaacatgactcttccagtgttttctttcaaaactggtacatgtttatggagttgtgtttcctagagttagcctccactaatgaagtcaaggttttgtctgtaaggttactggtaataggcacaaaatagtattcagaatcatacttggggacttgaaacagcatgggtatgttaaagccattcttattggttgccaaagggataattatttgacaattcctcatttgacatagaaggcatgggaaggaatctgacaactccagagcattggttatcttgtttgaaatgatttaatcctgaaggacaaaagcctcaaggataatttacaacaaataattatcaagaaagtaccattcttaaaagtcattgcctgaattttgttcttatgctactgaagtgtctttaatcttctacgaaattgtctcacatattttcttctaaatgcaatatatgattttacttatttgtgagagagagagagagagagagagagagagagagggccgagggggggcaaaattttcttttaatatctgtttagtaacatttgtctgtagaaacataatatgctatttaaaatgtggtagtccagacttcatttgcaaacaacaaaatgacctaaagaattgattgtactttgataagaacatgaagaaatttataacgggctatacaaaagacataatggagatagaaatctaaacaattataaattccttctgtagatctactatctacagaaggaataaatgcataatggtataagctttgcaggtcagatggaaaggcatcctgtcagtcaggagccaaggaataccaaaaagtcaccataagctttcctcgttgctccagggaaagatttccccaatgtaacaagtctgcttcaatagaatgtttcccccaggaaaactgttacaattctggctgattctgttggaaagttgttacttctttgttttattcctctcatcgaaaggttaccacccaatcctcattcaagacatttattggacaggaagaatccaggatagctgcctctaccatgggaaaaaaaaaaggaagaagcatactgaacaaacatagaggttatacagggttccttaggggcaacgtttttccaggctaaagcttttcagggcaggaattggtcagattttaatccctgagcctgggaaagctcagagattggcaggatttcatggttacatttggttttagtgctgaattggtcaggggaatgtgtttctttgtttctggtttcagatctaaagtgtttgtgtgtgtgtgtgtgtgtgtgtgtgtgtgtgtgtgtgtgcgcgagcacgtgtgtgcacccatgtgtgttttggttttttgtttgtttgttttggctctggttttagggctaaaatgtttctttggctgtcccctttaccctatatgggaaaaatggtcacatgtaaaacatgattttgatgagaagaatatttgagtgttatttgtgtacttttgaacccagagccttagtaaatttctcctattgtcacatacacatgaaatgaatcatataaatgcttttcacatctggaaatattgtaggcctggttctaaagattttgattgaaatatcatgaacttactataagaaatctcttgtaaaatgtacaatattcttaggctttggagactatatatggagagtatgtatttttctttctatgtcatgaataaaaagataccattgaaaggggctgaaatatgattccagattagacagggaccaactcttgtgtgtaatattctaagccccaaatcaggaaattcctccagccaaatgtggccaattagctaaacagtcttagaacctgaacctgtaaggtaaaaggtctcagagttaaagggtataatagttattgaccacatatgcctaaagttagttttgctgcaaaagccattcaatcattacccacctgatgtacctgtcccccaacagtccaatagaaactgatatgcttaaaaatccccaagcacccccccccccaattcctgtacagctttgtttctggtcaacaccacaactttgtgtggatgatcaacccctgcatgctggctaaatctgcagaataaatgctctttgtgtttgcaagttatttgtatgtgggatcttccctcgatgatcctcagacccttacaacatgttattttttttaattttcttatattttagaatataagttgtgatagcatgcatgtgacctgttcaacatcaagctattcaaaacccaagcatgaggagaaaaactgggcacttgatagatacttagagaggaagagtcagttttctgaatggatgtgctttgtagagtacctaacacccaagagtatatagggaataaaaattacactgctttttattagtctgttggattaaaacaggtcatgattgtaggtgggtatggaagggatagtgcatcagggaggaagcgatgagggatgtatatgatcaaattctgttatggaaattaccaaataactacaaaatgagacaaaatagcaggaactctaagcacagttgtgttttcaatttccctactatataaatataatgctggaattgtgttttgtgggattttttgtgttaccttggaagctgagggaatgaatgaggtccagagaagatgaacttaaaatactatttatgtttagaagttaagctaaatggtgtatttacattcagacatctgagtagtagtcagaaatggaaattatgccctgtgcttttaatgaactatgcatgctgcaaattatgaaacataaacaaattttcctggaaatagaaggatgccaaccagaggagccagtgactattacataccagcacatgggcaagacccagtaattcttctattaaaacctaagttgtttctgccagctagtgcttagtttccaacaaccccagtcacaatacatctctctaacaaatggcattggctacgaaaatatgtcttaaacttcccatgctcttaaatatttttcaaagtatttgtgtttttctgatgtgcattgaagatagaatacataatttctgctggatggtggtggcacacacctttaatcccagcatatgtgaggcagaggcaggcagatctcggtgagtttgagggcagcatggcctacagagtgagtgccaggagaggctcccaagtcacacagagaaatccagtcttgaaaaaccacaaaatagaacctataatttcctagccctaaatatccacatatacttaggatcctacatcccttcaaaattgaaatactctccagataaactaattgccctttgttagacacagttgcttccactgcaatagagaattgattgctaagaatacaaagagagaaaagtgtacaaacagagtagaattattctcaatcagaacgtcatttcactggtagttagcaagtacgttttctaagcaggacacagagtaatttgctgtgttggtgttaacatagaattgttagatgtgtgttcaaatgtgaagttggatgcttgagaacatcaaaatgaaatccattatgtcaactccttccagttccttccaacattatatccatctttaaactccatgcccttttaaaaagcccactgaatcacctaacttagttttcatttcttatctgagtagctccactagtttcaataccttagaactcatctcctcaagtctctacaactcaatggatataatttatgatttacaattttgttactcaaaattattcaaacataactcttctcctttctgcttgatatcagagttcataaaagtctcatttgttattgactttagactcccatctatcacacatttgccaacataccttttaaatagtggtgtggcatcattttgttggtcactaattattttctggcacatcgaattcacacactgaaagttctaagttttatactttatcagttttgaatgagaagcaactatcaaacacaattttgaaagtgtaagaagtattaagcttcactattttcctggattttagagttcataattgtctttaatgtttaatacactaaattctcagataatgtttctatctctgtgatgaaagagcatgacctaagcaggttttgagtagagggtttatttggcttatacttctccatcattgttcatcatcaaaagaagtcaggacaggaactcaaacagagcagaaattggaggcaggagctgatgctgaggccacagagtggttctgcatgttggtatgatactcattgcttgctcaagaaccaacattccagggatagcaacatccacagtttgctgggtccttcctcaacaatcactagttttaaaaatgccctacaagtttgcttatagcccactcttatggaggtattttcttaattgaggttcccttctctctgatgatgactttaaattttgtcaagcttacataacacccctcagaacaattgaacccttgacaaatcgacacataaaaatgtcacctttaagccactatctttctttcctcccttaatcaaaaatgtctcacattagaaacataaatagttttaaaagtcaaacagatttttgaaattcaacccattaaaagtttgggctccatcccacttgaagggttacactctggccctgaacacatggggaagggctcaggaccagcacaggaagatttgggggacgttgcagagcccctgctgagggccctaccctgcctggggagtggtgggtggtttgggctctgaaatatccattttgttaaaagtgaaaatctgtttcaaaagttcataatctctgtggattcctgtaaaaattaaattaaatactttctttcttcaagagtgaataaccagggcactgtcacaattataataaagcaaaatcaaactcccaacagtgtaagtaatgcagtgtccaatgtctatgatctcttcacatttttcaaaactcttccaaagagcttgggtcacttctctggctccatcctctacagcacacacggattgtcttttaagctctggcaggctccattccaccactaatgccgctcttggtagtcattccattacactggcatctccaacatgtagggatctcctataactggactttacattcaccagtagcctaccttagaattgtttcagggtatggtgccaaacctcaattcctctgcatgaccctttaaatcctgggcttctcacagtgccaaaccttggctgctacccatcaacccttcatgtgttcaaaactagtatccctagggttactcttaaactaccaaatttggtcaggtggcagtagcacgaaccttttatcccagcactcaggaggcagaggtaggcccatctctgtgactttgagaccagtctattctactagagctacttccaggacagcctccaaagccacagggaaacactgtcttcaaactaccctccagaaaaaataaagaaaactattaaattttgctgccattgtagtgtacaacttagccacctctggaccacatcttctgtgtgctaactctaaggaaatacttcctaaaaaaatttacctctgtaatctgttttttaaccattactaatttctcatttccacctaaccagcatcaattttctcagtaaaacaaaggtattactttgctggttctggtctccggttaatcacatctgacttttcagccccagataacaagactatgaagactcttcacaaaatgaatttggtagattgtttgctttccatagaaactccccaactaagaatctaagcagtaggaaagaggagaccttaaatgcccttcccgtataatgagattgatgactactttaaatgccatcataaagtcttcatccagtacctgatgttaacagaagcaaacacccacagctaagcactgaacagaactcctggcatccagttgcagattgggatgagggatgagggaaggcatcagtatggtgctggagaatcccatagaaacagctgacctgaacaagtgagagcacacggaccccagtcatgaagcttaggaaccagcactggtctggttccttctgaatgttggtgccagttaggaggcctgggcagtctaagggacctctgacagtagaaccagtaattatccctagtgcgcaaatgaatttggtagcctattccccatggagggatactctcacagcctagatacagggaagagggcttaggccctctcccaaatgatgtgacagactggatcatcccccatggaaggcctcacccccgttggggagtggatgggggtgggatgtggcagttggtgggggcatgagaggatgtgagggagagggaactgggattgatatgcaaaataagtttgtttctaaattaaataaataattttctaaaaagaatgcttaacctctccaagaacaaaaaagaaagaaaagaaaaagaaactcaacaattagacctccacagtttgtactgctctcaaaattttatctttaaagcttcaacagaaaagtccactgagctctcaacattcagtggctcttctaactcaacgttccaaatttcatccacaatcccctccaaaatgtggtcagttctgtgcagcaatgttccactactttttaccaacttctgtcctagcgagtgctactattgctatgatgaaagacaatgaccaaagaagatggggagcaaagtgtttatttgtgttacacttccgtatcacagttcatcactgaagggaatcaggtcaggataaatatctggaaacagaaactaattggtaggtcatttatgggtgctgcttactgtcttgctctgcatggcttgctcaacctgctgtcttatagaacacataaccagaagcccagggaaaatactgcccacaatggactgggttcaccccatcaatctctaattaagagaattccctaaaactttgcctacagcctgatcttatggctgctgttttcttaattgaggttccctcctctcaggtagttttagtttgtgtcaagttgatgtaaaatggtccaccataccaacccagggatagattttcttaaagtttgatttttcatagtctcctattgaatcgaaaaaatgatcagatctaaatcctgctttataactaataacaggcactgatattaacaactaaccttatttgggtaccaagattcccagctcttggatgatgatagagttttctgttctgcctgattccacagcccttagtctcaaataaacacacagagggttatgttaattataaactgcttggctaattgcttaggcttcttactgggtaacaatttcttcattattaacccataactatcaatctaagtatttttacatggcattatcttaccagagaatgcctggtatcctatcatcccagtagctacatggtgtctgtctggcagctcctccctgctttccctcttccaagaattctcgtagtctggtagccatgcctatacttcctgtctggctactcgtcaataaacatctcttcatcaacccaaaagagaaacatattttcacagcatacaggacatcccccaccacttaagtctctaggttcttcattcttggtatattttttccatgattctcaattaatttactacaatcttagtctctaccttcaagtctgatttcatctgaatatgttagggacccataactgaaattgcattgtatagtaagtcaccaatccctttgtcaattttaatttaaaatcaaagattttatttctctttcatggtacatggccattgaatgcttggtaaaaattggtttgcagcatctctatgaagtatagtagtttacacagttctcaaatcataacacatactatgactgaaatgcataccaagttaggtatataaagatcaaggaaagcttatccattcttagggagaaaattgaagacaggctcaagaaagttaactgactgttgcagttaccaaggtagaacctaaaagcatctgtttaaatagtgttccttaattcattataactgggttgggtatagatgacttgcaaataaaatacttcaaataaacatcactgtccaaaagccactatataagacctgctttaacctggatgcctaagttttgcccatgtacacctaggtaatctaagctcaaactgtcctaaccctgctcaaagggctgaggtttgtggagtttcttccatattacctccttctcatggctgtaatgaactcaaataagtaataacattaaatgacacaatccttccaagaaagcttttttccaggaccagggatacaattactaagaagacagcacagaaaagtgatgatgaaatcccagaacaacaagaagagtagaaaagatacaagctaattcctcaccatgctgcaacagtaggtgtctctgaaagaaatgcagcagcaccctgtaggtccatgggcaacaggccttcttagggataaacaatttgctccctaaattctattcctgtctgatttttcatgaagtgcaaaactattacagtactagggacttaatcaaggaagattcttttgttgttttactttttccaatttgtagctaaattaattcagagataaggtgtgggagtagtaaatacacatggaaaatcaagttgcaattttttaaaattaaatcagtgtcttagttagggtctctattgctctgaaaagacaccatgaccacagcaactcttgtaaagaaaacatcgaattggggtggccctcttacactttcagaggttcagtcctttatcatggtgaggagcatggttatgtgaatgcagacatggtggtggctacatcttgattagaaggcaacagaaagtggactgagtgttacactgagtgaagcttgaacaaaacagtcctcaaagatactcctcacattgacatacttttcttcaataaggcaatatctacttcaacaaaaccacacctcctaatagtgcactccctttggggaccattttctttcaaaccaccacaattagtatcagaggtagtggtttatgtctttgtgtgtcagatatatctcatgtggaattctagaataaccctgatgctctatacttacagtaaacattccttatccttgtccagaaaatgcttctcatggctattatttgcaaaactgaggcatgtatctttacacagagtaaagtgagagtatgcacatgttccagtgctcaagaccctcctttacagaatctcccaaatccttccttaaattactatgttcacaacatatcgtatcatcttaagccagcctgtaatggattctatgcttttggtaaagaaagtattaacctattacatcattaataatttcagtgtatgctgtactgtttatatataaataaatttgctccattgctaaggaaaagagttatattctgtattcctgccccattaacttcataattagcattgcttttcattgattgacagtgacattttcaaatttactcattgctttattaactaaaatgctactttcaaaattactcattcactcataaaatgatttgactttcttttgtctaccactgtgactttaaaacactgtgattttgatattattgaatgtttatttctaaatcttaatatttattttttcctgaaaaccattcaattctagatttcctcttggcctttacaatagaacttttagtatgagatactgaatttggtgcacagatgtgaatatatctccctgaatactgttcatatcgttttttgcttctgtgaagtgacatcaaaactgttactctatattctccaatgatgtcagcatagagcacacatttaataatatatagtacaatcttcataatagaatggtaaatccattctcaacctttactggtgtggaaaatgaagaaaatgtttatctaaaaacacccatttatttccactttttactgaaaacaaagtgaaattgaggaccaatgattttaaattggtcaaaattagagaaagaaggagatgaaggaacatatctttgatggcagtgtcaactgtacagactccaaagctgtgttagatgctggttacatttctcctccaacagccagaactgacaccatgaattctagctatcagtagtgtcatttactgcacagatccagattgattcttctgtgtcctatacatttaaatgcatgatatcttcagaaattgtgttttatcatgtggttctcatagcagccaagagcagcagcaattgtctgtgctgtttcaggtgatcccttatggatccccagtcatttctctgcagaggaaatagaatgtctgataggaatttcatctggctttactggatgcctgagaacttccttctgatgattttttttattttcaacttagggaaaaatcaaatattcatgggggtgggaaagcacagttatttatctatttgtaaaaacacttgaaacatatacattggatgacaatgatttaaggtgttaacttattggtttacagtttacaatgctctggcctctgtgcaaattattgagaattatttcactgtaaaattctacttttctttgccttttgttgacctcacttatataagaagagcatatggtcccagtgagtatgaaaagcaagtatgagattgaactgttttagaatatgccaaaaggaagcataacaaaaactcttcccagtgttttctaatgaacaaaatgataattgaccagatgtttcaaattcacaataattagatccataaaatctcttcaatagaaccaagtaggaatataaaagcctatattttatgtacttatgctatgaatttgtaatgtaaatttatttgttgttggttttaattgataatgtataaaatcatacaacattgatttttctcctgaaaatagctgagaattatcaacatttataatttatgcactgtttctattatagctataacagatcacaaatacaacatgctagaagaatgtattatttcaggaaaaatttgccattttcagttagctgcaaaataactatatggtctacttattagacatttgtcagaatgacaaatattttattcagttatcatcagaagattctaacagttaactcttgaaataactctaaaattctttaataacttagggaaactctcatttctacaaatatttttcattttaatatatttaaaaaggaagtgtctcctggtttcccattaaaaattagcaataaacaggatgattctattgtgtaatcgcctttcatagtatttctccctcatgataatattatctacttcttggtaaaaggagtattcattatgtttgaaaatcattataaattgtggaaaagaagtctacaattacatatgtgaaagtatctaaaatgaaatattttctttttctatacacattaaaataattttaattcacttataacaattacaatttaaaaatgtcagacaacaatggtagcaaatagtaatatatcatgtctggatttaggaaggacaggaaaagagaagaaatggcatgagataacatgtatttaaaagggaaccagtgagatatgggagtggaaacaaaaacagaagaggagtcaaaacaaaatctgttctttttaaactccatgctttcctagaaatgctctcatctattatcactattatatttatcaattacttctctcatttaatttctttctaatggagtttccaccaattccttcattacctttttctttggaattttacttaaagtccttaatataacacatttcagaagttttcttcatgaaaattgactgtttggagaaagtaggccctgaactaactttgtgcatatgttgaaaagacatttcctgctccccaccaagtcttttctttcctgaaatgtgaactggggtaagttgctcaagagtatgcaaatacagcaacacattggtggtgcatgcctttaatcccagctcttggaaggcagaggcaggcacatttctgtgatttcaaggccagcctggtctaccgaacaagttccaggacaggatccaaaaataatacagagaaagcctgtcttgaaaaatgaaacaaaaaacaaaaaagaacacaaattcgcaatgtttatttggtaaaatttttaaacttaaatgatcattcaattattatcacattagagctttgtgcttcagtaatgactaaaactgagatgttaaaatagaaataaatgtttgtatatttgtataaaataagcatacaaactatattcaatacagtcatcatcaaaattcaaatgcaatgttcataaaacttgaataaataatcttagaagttatctggtaacagaaaggcctagcataaccaaatcaattctggacaatctacactgattgaaggcacacaatttctgacttcaagttctaagatagaatttcaataataaaaatggtactgccattaaaatgagacacattattgaataaaattgagaacacaggtgtaagcctgcactgagaataactagggtcatctgtgtgatcgtgagtttggaagtattaattggaaactggggtgctcatcagaggacactgtcaatgtaatattgattgctattaatatttatttgactttatttgatgtatcacatgaatttagtatagtgaatatttgctttcattgaaattttgtattttttcttcactctcccttaaactataagttattcaagtatgtaagctattaaattttatatgctcatatagtattcccaagtttcctgttctagatttgtaattcttttgtattatattcataaaataaactgaatatgatatcagaagtgttttcttaagttatttaaaatcttgtggtcaatcttataatgtatcctgaaaaatgttccatgtggggataagcaaaaggtacatttaccaacaagttggtaatttagtttaggggaccatttaattcagctagttcctaactgctagttcctaccttaatggaagcctcattgctgaatttggcatgttatattttcccattggaatatatcatccctatcaagtataccagcattttatttatatatttgtgacacattgggtgcatctatgttatattttattattattttctcttcctgaatgaacttgaaatcatttatgaccttcctgtgtctttgtgctgcttttgatttaaaatctatgttatagaatgtaaacatgggtgttcctcctttcatgcatactacttattctcagcctagatacaaaggagagggcctacttcctgaaccaaatgaagtgtcagactttgatgatcccccactggaggcttcaccctccatggggagtggatggagaatggaatggaggtttggtgggaggcatgggatgatgggagggagagggaatttagattggtatgcaaaataagattgtatttaatttaaataaaaatttatttatagaaagaatgtagctcaagtcctttttagacacggtacatccttagatgctcatgattttcatgtgatcagcacatacttgggcctatattttgtttatctattaagtctatttatatcttataattttgcatctcttcattacatcccaggggaaagaatggtgattcgtatcatgtgctacgcccacctgatagcttttattgccaaagaccaggctaggattggtgagggaagtcctgtgacatctacttttactctcagctgtgtactgctgagtcacaaggacttggacagtcttgggagttatatagctggccatggttttgaaattagattgaagcatgagtatacagtaaggaacaggttctttcctaaagaggataattttgtatatctgtttctacaaatcagcttggtgacagctcttccttataaagttgtagataggtggaagagacagttcattggctaccttttctgatactaatgataagttcatgagactcttatagctatgctatcctgcataatctccagagaatggtatatatgactcagaaccattatgctacagaaaattatatctgaagaaattcaagtgtatacttctgcctgatgctggccagagtaaggctttggctgtgacttctgtctcacacttagcatccttcagccatcagatgagtttcagtggtctggcttgtctctgggtccaagactaagagccctgtgctcttagttcacaccctgcactctagagagtggagctctgtcggtatttctgtagcacctgcctgcaaggggatgataaaagtttcctttgcctgagctgatagcagtttgagcctctcaatccatggaaattctcctggactctaggtcttgggattctggccatttcactgtcataaacctggcatcaatcttatgtatctttttctctcctccccagacaaggagagtgtgcatgtctctgatggattatgtcatgttgagggagtagtgggaaagtcagctcattccttcctgttttattgaatacacatttgtaaattttcatactaaagtcacatgtagtgatcttccatctggtatctttagttcttgtgaagatactttgatccatgactagctagtgattctgtgggaaaacaaccatagaagccttgattgacctcagatttatcttgctctacccactctaaaatcttatattaaaaatgtatgtattttcattttatgtgtataaatgttttgcatgtgtgtatgtatgtatgcatgtatgtatgtatgctgcatacatgcctggtgatagcagaggctaagcatcattgtttctccaagaactggagttaggtatgattttgagtagccatgtggagctgaaaaccaatttccagtcctcaagaagggtaagtgaattcaatcactgagtgatgtatcaaacccaaccctcttgagctttcaaagattagatattctttgagtttgattctctgaaatgtgatgatgagaacatgcatcttggccatcctctgtcagtataactcaatggtgccaacctagaaaaggaataaagagccaagcattttaactgactatatgtattaaaaaagaaaagaatccagacatttctaaaatggcattttcaaaagcatatttttataatagtatatttgatagggaagaagtaggagaaggagaagaagaagaagaagaagaagaagaagaagaagaagaagaagaagaagaagaagaagaagaagaagaaactacaattagccagatgtatcttgaatcaaatatgtctacttatccacacaattaaaaataatgaacattaagtaagaacatgaatgtttggttacttggtactggttagttcgtttataaaatttttgatcttttaaaaaatttataaaacttgatttggaaaaaatgtgtaagataataaaaaatatattcatagaaatttactaatatatttctttgaaaatttgattttaataaaattatttatagaagaacactaagagtgtagaagggagattagaaataataaacaaatgcatgctatagaactaaagacatattggaagccaatttaatttttgtgtactaacaaatatttttttttattttaaatcttttcattgccttcaacgttaggtccaggaacattgtaagtggatgtttcctttataagccacatgttcatctcagtgtcatttttatagaggtataattatagtattatttttgccacgaacttgcttcagtaagtctcagaggaagagaaatgtttaaaggagaggtcattaaaaattacggaggcctgcacagacacacaactagacaccagcctgagggaaaaaaaatgaataaggttattttcagtgtctcccaaaacaagaaagaatcatattgatttaagataacttttttccagaaatcattaaattgagaacttttaaaagagaaggcagagtagtcccattgagtttttcattgagagacagctcatttatttttttaatttgctccagctactgtcaatcactcactacagaggtcctcttatgatcatataagccacagtatttattaacagcagaagctcttctccgttgctgtagaaagactgattattagccataaatgactagatttcatctcaggaggtaaagatttttctcacctgaaatacattgagactcatcaagaagttcaactaagttcttggcactttctccaaacgtgttaaaatgaaaaattcaactgagccaaatgaaaggactcagactgtgatgggtgttaggaagtcaacacatcaccaagggaagtggcagatccctgatgtctacatgaaattgttacagctcatggaccccagactgatagttgagaaaccagcataggactgttccagatcccttgaatgtggatgtcagtttggaggtctgggcaatttatggggcctctgatagtggatcagtatttacccctagtacacaaatggactttatgagccaaatccatatagaggggcactctctctgcttaggccttgctccaaatgatatctgcttctccttccgtcaggtggtagatgaaggctctagcatggcatttaagcaagtcatcaatctcattatagaggaagagcatttaaggtagcctctctgctattgctcagattcttagttgggtcatccttgtggatccctgggtatttccctagtgccagatttctctttaaacctataatggctccctctattaaggtcactcatttcttgctctcctctattcttcccccaaatcaatcttcatgccccctcatgtcttcctcccgcctcctcttctcatcttctctttctcttatctccttccacctgcccctggagctccccatttgctcaggagatcttgttccttctccggttgtaacatagcttatgtggaggtatggattgtaggctggtaatcctttgctctatgtctaatatccatatatgagtgagcacataccatgtttctctttctgtcactggattacctcattcaggatggattctcctagttccatccatttacctgtgaatttcaagatttcattgtttttttacatgagtaatactctgttgtataaatataccacatttccttcatccattcttcagttgaggaagatctaggttgcttccagattctggctattacaaataatgctgctatgatcatagttgaacagattctttgtggtaacaatgtgtatcctttgggaatatgactaagagtggaattgctgtatcttgaggtagactgccattttcctaagaaactgccatactgaattccatagtggctgtaaaagtttgcattcccaccagcaatggagtacagttctcctttctccacatcctcttcagcaaaaactaacattggtgtgtttgattttagctattctgacagttgtaagatggtatctcagaattgttttgatttgcatttccctgatggctaaggatgctgaagaatttcttaagtgtctttcagccatgtttgattcatatattgataattctctatttagttctgtacaacactttttagttggattagttggtgttcgagtggctagcttcttgatttctttgaatattttggaagtcagccctctcagatgagggtttggtgaggatcttttcccatcatgtgggctgatgttttgtcttgtagactgtgtgcttttccttacagaatcttctcagcttcaagaggtcccattattttttgtcattctcattttctatactactggtgttatgttcaggaagtcatcttctgtggctgtttgttcaagggtacttcccactctttcttctaagagttttagtgtgtctggaattattttgaggtctttgatccatttggacttaagttttcaactgaagtactgtgtgggacaatagatatggaactatctgcaatcatctacatgtcagcatccagttattccagcaccatttgttgaatattattttccattgtatatttttagcttctttatcaaaaatcaggtgtttgtaggtgtgcgggtccatatcagttctttcaattcaattccattggtatacctgtctggtttgtgtgtgtgtgtgtgtgtgtgtgtgtgtgtgtgtgtgtgtgtgtgtgtgtgtgtgtgtgtgtgtgtggaggtaccaagctgttttcattactatagctctatagtagacctggaagtcatggatgatgtttcctccagaagttcctttatcctgcagggtattattggctacccatattttgttttttattttcatataaagttgaatattgtcctttcaaggtctgccaagaaatatgctggaactttgatggagattgcattgaatctgtacattacttttggtaagatttccatttttactatgttgatcctacctatacaagagcatgggagatctttacattttctggtatcttctttaatttctttctttgaagactcaaatttcttgtcatacaagtctttcacttttttggctggtgttaccccgagatatttcctgttgtttatgaataatgtgaatggtaatgtttctctgatttctttcccagctcatttattgtgtatatattgtagggctacagatgtttttgtgttaatcttgtatcctgtcactttgctgaaggtgtttattggctctaggggttccctggtagagtttttggggtcacttatgtaaactatcatatcatctgcaaatagtgaaagtttgactgcttcctttccaatttgtattcccttgatctcagtttcttatcttacagctctagctaaatcttcaagtacaattttgaagagatatggaaagaggggacaaccgtgttttgtgcctgattttagaaaaatcacattaaatttctctccatttagtttgttgttggttgttggcttcctatatattacctttattatctataggtaggttcttgttattcctgatgtccctaagacagttatcgtgaaagggtgttggatttattcaaagactttttcagcatctagtgagatgatcatgtggattttctttttcagtttgtttacatggtggattatattgacagatttttgtatgttgaaccatccctgcatctctgggatgaaacctaattgatcatgacaagtgttttttctggtgtattcttggattcaatttgctagtatttaatggattatatttgcatcaatgttcatgagggagattggtctatagttctctttctaaattgtgcctttatttggtttgggtacaagggttattgtaacctcagaaaaagagtttggcaatgccccttctgcttctattgtgtggaacaatttttgatgacaacttctatttccttaggggtatgggtctatttaaattacttatctgtgcttgatttcattttagtaagtgatatatattcagaaaattatccatttcctttaagttttccaattttgtggagtacaggtttctaaaatgtgacctgattattctcttgatttcctcagagtctgttgttatgtacaccttttcagttctgattttcttaatattcatgttctctctctgccttttggttaatgtggataatggtttatttatcttgttttttttcctgaaagaaccacctctttgtttcattgattctttgtattgttttctttgtttctactttatcgatttcagctctcaatttgattatttcctagcatatactcctcatatctatgcatctatgttctctagtgcttttaggcatgctgttaattctctaatgtgactattcacttgtatcttcatttgggcatttagtgctatgaactttcctctttgcactgctttcaatatgtcccataagtttgtgtatgtcgtgtcttcattttcattgaattcttgggagtctttcatttgtctgtatttcttctagacccaggaatgtggcaattggcatattgttcaatttctatgtgtttgtatggtttctgcaattgtgttgttgctgaattttaactttaaatcatggtcatctggtaacatatataaggatattcctatattctttgtacctgttgaggtttgctttgttgttgagtatgtggttgatttttgagaatgttccatgtggagctgagaagaaggtatattcttttgtgattagatggaatgttctatagatgtctgttaaacccaatttggtcctaacttctgttagttcctttgtttctttgttaattttctctctggtattcctgtccagtggtaagagtgatgtattgaagtctcccactacaagtaagtgaggttttatgtgtgatttcaggtttagtaatgtttctccaatgaatgtgaatgcctttgtatttggggcatagatattcagaattgagacttcatcttgatgtatttttccagtgatgaatataaaatgaacttctttatctcttttgattaatttagtttgatgtctaatttgttaggtttggatagctacaccagctttacttttagttaaatttgattggaaaatctttttccaatactttactctgaggtaaagtctgtctttgaagttgaggtgtgttttttgagactggcatgctgcctaatgcactagggaggcaagtagaggtgtgttttttgtatgcagcagaaggatggattctgtcttcatatctattctgttagattgtttctttttataggtgagttaagaccattgctatcgagggaaattaatgaccattgattattgattattttggagttgttgctgctggtggtattgtttgtggatttctctcctttttattttggcttttggtaatgtgggatttttttattgcctatgttttttgtgagtatagttaacttccttgaattagagtttcccttccagtactttaggtttggatggatttttgatattcatttttaaatatggttttgtcatgtaataacttcttttcttcatttataatgatttaaagctttgctggctataatagtctgggctggcatccatggtatcttcatgtttgtagaacatctatccagtaccttctggcttttagagttttcattgagaagtcaggtgtaattctgataggtctacctttatacattacttgtctgttttcctttgctgtccataatattcttttttattctgtaagtttggtgttttatttattatgtggaaaggggactttcatgttctgtaaacttcttgtactttcatgggcatgcccttcattagattaggaaaatttatcttctatgattttttgaatatattttctacacctttgtgctggccttctttgccttcctctatacctattattcttaagtttggtcatttcattgtttccattttttcttggacatattgtgttaaggattttttggacttaagattctctttggttgcagggcggtggtagcacacgactttaatcccagcacttgggaggcagaggcaggtggatctctgtgagtttgagaccagcctggtctacaagagctagttccaggacagcctccaaagccacagggaaaccctgtcttgaaaaaccaaaaaaaaaaagagattctctttggttaagaatctctttcctctattgtattatgaacacctgagattcttccatttcttgttttctgttggttatatgcttgcttctgtagttccttatcatatacccagattttctatttctagcattcccttagtttgtgttttctttattgtctatatttcagttttcaggttgtgaaatgtttgaattgcttccttcatctgtttggtagttttttgttttgatttttttgctttccttaagagacttgttgatttcttgcatttttttgtcttttcttccattccttccatcttttgtttctttttcttccatttctttaagggattttctcatttcctctttgaggacctctatcatctttataaagttgttcttatggtcattatattctgcttcatctgtgttgtgataatcatgtcttgatgatgtagaatcccttgactatagtggtgtcatattagtgtttctgttgttgaatgtggtcttagactgttgtcttcccatcccttcttccagagggtacaggtggggtctctcttctgatggatacaggctctctccacatggatataggtggatccatggctccatttgcagcagattctggatggtttcttttgcagccaggtctctcttagtggataatgtggcaggatagatctgtgtaccatgggtcatggaactcagatagggaaatgtgagcaggataaggcctagcacacaccactcctggtgagttcaggtcccaaattgcaatggttgcagatgctagatgctttgttctgcctcgaggtttctctgagggattcagtggtgggttggttctgaggtccataggtcaggggactgcaacagggaaagttgagaaggagaatgcctggcattcatctctcccagtgggtttggcttggacttataaacggatcttaagttaaaaactttatagttatgttcacagacagagtttcagatgtctaacaaaggttatttacacaatatatactaaaatatcataccaattctttgcctgccaagtctagttgataaaaagaccttttttctagcttgaatcactaggcactgtgtctccaccctctggtcacaattttactccagaaaccttgaatctttgcattgccatggtaaagagcactcatccaatggaatgtacttttgaccaatgagatgtaactcttgtaatttattatttgcctcaagccttctctaaaaaaagtgtacttaatctagatgaacagagaatcagggagaattgctacaaagaattgaaacagagaattatagaaggaattagaactacagaattggagataaagaattagaggttagaaattatagacaattaggacaagagaactagaaaggcagaacaataaagaacatgacttgcatagcacatgtgtgagttcattctgttacccctcaggttagaaattttctaagttcccttcactactttatgacagctgactgaatcctgggaggaaatcagaaaagctggattctgctagctccccataaacaaatctgtgactaatatgaataaaagaaggaaaagaaacccagtttcaatgtacagaaaatattttcaacaataatacaagatatccctaacttaagaaggaggtgcatttcaaggtacaagaacaatacaagacacccaagagacaggaagtgcaaagaaaatccccacaacaaataatcaaaacacaaaaagtacagaacaatggaataataataagagctaaaagagtgaagggcctaatactatatgaaggaaaacctcataaaataacacctgttttgtcaaatggagactctaaatgctataaaggccttgacacataatgtatagaagttaagaaaccccagatcccaaccagactactatatccatcacagatttcaatcaaaacagatagaaacagaaagttattcgaagagaaaatcaaatttaatcagtatctattttcaattccaattctacttgaggcactagaaggaaaatgtgaacctgaggaagtttacaacacctgtgaaaacaaggaataatttcaacactagcaaattaaaattataagggggtgggaaataacagattggaaggatgtgaaaaacaggattcatagttctgctttatacatgaaatatatttagatcaaggatgcccatctccttggtgaaaagtatggaaaataatattaaaatcacatgggcctaagaaacaagctggtgtagccacgacaatatctgacaaaatagacttaaaaagtagacaagtcaaaagacataaggaagggcaatacacaccaatcaaacaaaattcatttaattctaaatgtttatgcaccaaatacaaagatatacaagttgataaaagaaatactacagctaaacttatataatgagcataacacactaatagtgggagatttctacactctactctttccaatagatgggtcatctagataaaaacaaagaaatactggagtgaatacatacaaaccaaaattacctaacagttacttacagaacatttgacccaaacacacccacatacacacacacacacacacacacacacacacacacacacacaaacacacacacatttatattcttctccgcagctcatgaaatatatatgaacacaaactaagtctccacagatataaaaaaaaataaaatatcatcctacattgtatctgaccaccatggattaaagctggatatcagcaacaacagagcaaagagataacgctgataaactattaaaaactgagcaagtcaccactgatgaaaagtgattgaaactgaaatcaagaaagaaatttaaaaattatttaaaattaaattaagacaccacatacacaaacatatgggaacaaagattatctaaacaaacaaacaatacaaagaatcaataaaacaaagacttggttctgagggaagatcgaatatctgacaaacccttaccaaaattaagcataatgcagaaatcaattaatcaaattaagaaagttagagatttaaaggcagacataagaacagacatgaaagaaatccagagatcataaaaaaaagactgtcctgtaacaaactggaaaatgtaaaagaaattgataatttcctaaatatgtatcatctaacaaagttaaatcaagatcagataggcaacttaaacatttaacagactgataaaccatactgaaatagaagcaaaaataagtatccccacagatataagaacaacaacaacaaaacccatggcaagaattacagagttgcttcaatgaagaattctcagatttaaaaataagagttaatactaacactcctcaaattattccacaaaatagaaatataaagaacattgttcaattcattttaagatgcaacagttaccctgatacacaagccatataaagacacaacagacaaggagaattacagaccagtttcccttgtgagcaaaaaatgcaaaacttctcaataaaatatttgcaataaagccaagaacacatcaaaaagatcatccaacatgatcaagttgaattcatcacagagatgccggcatgattcaacatatataaatccattaatgtaccatataaacaaactgaaagacaaaatacacatgataatcaattagacacaaaatgatgtttgaaaacctcaacacctcttcatgataaaatgttctaaagagattaggaatacaagggtgatacttagacataatgcaagcactttatagcaagcacatagtcaatatctttttggggggttttcaagacaggtttctctgtgtagctttggggcctattctggcacttcctttgtagaccaggctggccttgaactcacagagatccacctgcctctgcctcctgagtgctgggagtaaagatgtgtgccaccaatttcccgctttctctttctttctctttctctttctctttctctttctctttctctttctcttcctcttcctcttcctcttcctcttcctcttcctctgtctctttctctttctctttttctttctttctttctttctttctttctttctttctttctttcttttttctttcttttcttttttgttttttgtcaacatcatcttaatggagagaaacccaaaacaattctactataatcaggaacagaaaagtttgtccattctcttcacactttttcaatatagtacttgaagtgtttactaaagaacacgacgaccaaaagagatcatggggatacaaatcagaaaggaagaagtaaaagtatttttatttgcagatgatatagtagtatatacattgcaggctaaaattcaactggaaaccccctatagttgataaacagtttcagcaaagaaactgaaattcaaaagttattcagtgaaatcattagctttcctataggtaaatgaccaaaagactgagcaaggcatcagtgaaacaacacatatttcacaataaccctgaatagtataaattagctcaatgtaactctaaccagacaagtaaaagacttgtaggattaaaaaaaaaaaaaaaaaaaaaaaccaaaaaagcctttaagacactggaaaaaattgaagaatatatataaggatggaaaattcttcagtgctcatggactgggaaattaatacagtaaaaatggccatcctaccaaaagccacctacagattcaatagaatccctatccaaattcaatacagagtttcacagttcttgaaagacaattttcagctgtacatggaaacacatacacacacacacacacacacacacacacacacacacacacacacacacacgcacacacactgggatagctaaaacagtcctgagtaataaaagaactgcttgaaatatcagcagtccttgtctcaaattgttctacagagctatagtaatacaaacaacatggtattcaaagacatgcttatcaatgtaattgaaatgaaggcctagacataagtccccatacttatggacatacttttttcctaataatgaaaacataaatacatactggaaaaaagacatcatcttcaacaaatgatgctggtcaaactggatgtttacatgaaagagaatgcaaaagacccatacatattacccattaccctgcacaaagttcaactccaaatggatcaaagacctcaacaaaaggaaagatacactgaatctggtagaagacaaaatgtagaatggtcttgaactcatggacactggaaaagactttctgaacaaaacattgataacacaggcactataaacaacaattaataattgcttctctattgcaaaggccacaattatttgaacaaagtagcaggctatagaatggtaaaagtttgtttttttttaaactacatatcccatagaggtttaatatttaaactatatatagaactgaaaattttaacaacaagaaaacaaaaaacacaaaaaaattgtgtacagagcatggtggtgatggtacacacctttaatcccaacacttgggagtcagaggcaggaagttccctgtgagttcaatgccagtctggtctaaagagctattttcaggtcagtcaagactgctatatagagataccatgtatgaaaagaaaagcaaaacaataaggaagaaagaaaaaaaaaaaactggggtagagatctaaacagacaattctccaaagaagaaaattaaatggatgagaaacactgaaagaaatgtttacacccttagccatcagggaaatgaaaatcaaagctactttgagattccatcttacatcaatcagaatggttaatctcaataaatgaaaaatgacagcttattctctcaagacatggagtaagaggaacacactcatctgttgctggtgggaatgcaaccttctatagccactatggaactcatatggaactgtggcagttcctcagaatgattggaatagaccatcatcaagatccatctgtgtcactgttgggcatatactcaaaggattcaactttcttctacagagacacttgctcaaccatgttcatgattgatttgtttataacagacagcaattagaaacagtgtaggtgttcatagaaggataagttggtgaagaaaatgtggaacatttacataattgaatattattcactatttaaaaacttaaattgttaaattcacagtaaataattcaaaataaaaataatcttcatgatgaaagtaactctgatccaaaaaatccaagtattgtattatttacttatgtgtagacattagctttgaaatttttgaagaacagtttacaattcatataaccatagagattgtatgacctattggcagggctctccctaggaaggggaaacagaaaagttagttataaatgctggggaggggaaagactggaacaagtagatcaaatggaaagtgggaggaaagaggcatgtaagggaaggaatataggagagacaactaaaactaggtgatgtttaagtggctatacagataatatgtacatgtgtgaaggtggtctaaatggaatcatcaaataatgttggagacaaagtgcatctagacatctcttgtcatcaaaatgaaacctccagtgttaggaacgaattacatctaattaagttgttgttcaagggggccccatggaaacttttcccaaaaccacactattgccaaatccatgggttactttatccaaactgatggtaaagctttattgctgaagataacacctatataacttactgaaaacttagaaattgagctgttgcctacatcaaacagcagtcatactgactagtttttcatggactaaaaggtactctgcatacagcaagaggataaatacaaccaccaacccagctataaaccctgcagtctacaatggtgacctgcctgcaagacacactaatgtaataatgatacaacatgtatggacttacagcaatatatgattggatttaaggcctattccatgagatagaaagcattcctgacactgctcagaaaagaacctaagtctagctaggtcataggcttagagtaaagcaaaatatgattgttttcaagactccagatcttcagatcttttgcttatatagtatggcttctttcttccttttttatagtgtgatttctgattttctgttttcttggtatttatactctagcaaatgtctatgtctctaagagtatatatgattcttttgcttttcttttgactttttcctgttctttttttttgtcctatttaggatttttgctcttattttatctttattattactatggctattttatttagatgtctcagagaaggaatggatatcggttttattgctttggggatgaggaagatctggaggaagttccagtagaggactacaatcagaatatattctatgaaaaaatatattttcaatataaaacagaagaataaatattataaaacaatgctctaatatcattttgcctaaaattctgaaccaatgttttttacatataaaagtttaacatacacagatcacgcctgtacacatataaacacaacagcatacacacacacacacacacacacacacacacacacacacacttttttctatccatttcagagtttaatccattgcagagtttaatcactcaaattcaggttgctcaaggctggaaaaggccttgttggctctgctaacacattctctgagcagccttcacctgctgcttaagtgtcagaacttgtgcttagaaagtcactttcctttggttttgtcttggtatgtttctggtagttcattactgtctgttgaagatgcacctacgatctgggctctaggtcattcctcaagaatactgaattccccagtgttgcttgtgagcatatgaaatatgtacaataatacatctcttacctcttttcttagccaggtttgtcacaccaccaacctgctcccactattgaagattgaataaaagtgatgtttccctttcagtggccattaattaatcagaaatggagatatataaagtagcacagtaggtatgtatgatcttagaagtgaagcaaacaagttatgatttccagaacaatataaaacactcaagattttttttttgttttgttttgctttgtttggtttctggtgttttctgacagggtttctcagtgtaacattcctggaagtcctggaactcactttgtagactaggctgaccctgaactcactgagatctgtctgcctctgtttctgagtgttgagattaaaagcatatgccaccattgcctggctatcaagttttgttttgttttggtttggttttgatcacatttttatgaagagattaaatgagtgaaattaaagggagccttaaagtgtagtttatgaatttgaacttaactcaaaagacaagggagaatgttaaaaacctgaactagtaggctctcaggagcttaaatttttctttaataaacctgatataacaaacatatatgattcacaattctctagagatggagcagtaggcctgagttgggaaataccatgatataacagatgacagcccaagacttaaatcaaaacagcccattttaagtctctttaagtcatagtgtgttctgagaaggtcttgtcaggtgacatcctcagtgaggacatcagggagtgtgctcaggccaaaaaaacattcagatagctttcagaaatatgatcctgtgtttctattgtcctatatcccctctactgtcactccaatcaacactgttaaagaaactacagtcaaaaagaggaagtaaatatatattgaacagtattttttagttatgaaacatgcagggttggaaaaccaacagttatgacatataggattaagagaagaatctatatatcaactgaagggaaacaagagcagtgttttcattttgtctttctcataaataaaggtctacaaatcatgaagcttgtgggcagaggaagaactccatatttagaaataaacaaagaaagtcctagtttttaaatttacagatgcaagatattttaatcacagttaaaatgactgcatcttttctctgatttccaattatcacacttttgaaagttctctagtagagtgacaaagtggctattggcatttttaggatctcgctaagcaaagctatactcactgacatatttagtttaaattcaattgattcaacagttttccacttaagttatttttagtaatctcaatattaaaaagattctaggaatttctgtccctcccttttactgactcagtagaatcaaaataggaaaatggaaatccagatgtgttattcaaacctttttagagtgcacgagtataagcaagatgagctttcacatgcctagtgatggaacatggtctcaaaattcttcttctcatcttatgggtgcagttgtgaacagagaagatatattcagctttgtattttaaaaaagaacttttcatatataaatatacttaatcatgagtgaagccagctataggaaatgatatattctttccctttccaggtagaagttcattgccaattaagcttcttgataagcaagtttaactgcagaaatgaatgatatttcaagacagttcaataaaacaagaaacttttgattattgcttatcatataagaaatacagcaaggtaactatgcaagttggatgcaaagttttatccaagttcagatacttgtataaaatatttatattttctttttttagtttttggttttttgaggcagggtttctctgtacctttggaggctgtcctcgaactctctatggaccaggctggcctcaaactcacagagatccgtctgcctctgcctaccaattgctgggattaaaggtctacaccatcaccaccatgcattctcaggcaaagttggcatctctcaagttatctatttttttttgtaatggggtaaaagaacctgtcttaggcataataggagccctcattttctaatttaggttccctctgttcaaggatgtgtgggtataggtaagaaggcaatggagaagaaagagtattgagaaaatccaacatgaaaaggaaaagaagagagagaggaaggaaggaaggaaggaggtaaataaaggagtgttgttgcccagcatgtctcagcaccaagccatggaagccatgaggttcggcctgagtgggggagcctgggcttggaaactcctagcaaaacaatggtgataaaaccaaacacaggcatcttgtcattcttagagagctctcacttccatgttgtaaaactagagtctcttgtttatttagcatcttcttggctatttcttaaccatgcttccatggccatgaggaggccatttctctcctcgtgacccctctctgctccatggctcctaactctctgtcctcccatgttacttacacacccagcacctctgcccacgtgcaggcctattcaaatgcttagttctgtagagatgcaaactaggagacattccccactgagaccatgctatacaatagcagatcctctattcaatgtagacctgatctcctgtttactggaacccctggaaatttagtaatggaattttcctggctcccaacaagggagaaaggaattttcaataaactaagctaaattagagaatgagggctcccattacagctaaggcacattcttttacaccattactaaatagaaaaaaaaagatttgagtgatgcttattttgcctgagaatgtaatgtgaaatgtttcagataaatacccagcaccttcttgcaatggttctgttttatagttgttctgtttgatgttaatttttgttttgttgtttaatgtcgaatacacactgttggtgcagtcattccaagcacagagcaatgccatcattcttggttcttcgtaagttttactttagaggaaaggccctaacaggtgtggtcacccaagagagctccttctaggaagcagtgttttcccagatttttctttcatggactagatttaagagttcttaaagacaatgcaaatggttttagctggagagtgattagatgaaagtgctcacagctgacaagtaccctcatttactcaaccttaacataactgtctgcttggtttgttcaagacctcctttgggaggtgagcagctgatgaacctttgaagggcagcgaaatgcttcggtgcaatgccttttaaaccagagaagtggtttattcaggttgtacctctgtcttttgctagctgtatcactggggaaaattgtctactttttcagaatgaggatgttaggaatgtttatttcaaggaccagagtagttattaactaactgaaacacatagcaacaccaacatgggttttttcaggtcacatatgtaaggttgctggctttgtttggagttaccatgctttacataatttgtgtctgttagacccccaaaaactcaagtattcggggtcccaggccatgttctagatcaccccaatcaccaggcggatttgagagcttgctgcaaactgcacgaggctttattgtaatttaacgagctaaccccatgttagctctggtctttcacccacccgccatggcagacagctagaaaagaaggtttgaagccactgcatacagatctttatagggcagcgtaaggggagtgtctaggggtatgcacaggctcacaattggtgtgcctccaggcttggagggcttgccctgtgttgattggtcaactggttgttatggctcataggccctcccagggtggttgctatgctctctgcgtcattgctgtgcgcttgtccataaagcacacccagggtcgtaaagcatagtgccaccagctaacttctgattggttccttgtcacaaggcagacatctgactttctagtgactaggtcaaggtcatagaagcacatgttcggctgttatggctgccgaaagggaagctggttccttcagtgtctataatttttttctcttcatatcattcccttttacagaccatggattcctgtatcacttgaaattcaatacaagaaagcagtcttctgagaatgtagataccacatcctacatcacaaaagcatagttcataaattgctgctgctatgatattcatttttgcattctcactttggttctagaataaccttcgtcatctttaacttccctttcactctgaaaaatactatactgtgtttcccattagcaatctatggcttcctcagtgtcaatgtgaataaatttgcacccagtgatgctgagcctcatgttcaaacctttcttcaaaaatagatagtgtgccattgttaatttcaagctttcttaaaactacaggattcagagcaaaactgacatgtatctcttcagatatttagatcttgggaacacatattgttcacagggtctatggagtatgccctgattgacaacaaaatcagttggtatcattagctatacctgtagaaataatctaggagtgctgtagaaatgaaaacttccaccctatctttaagttatgcaaatgttccttctgttctagtagtccaagggctttcttctgtatttttgaagagactatttcatttgactgttgtttaaaatatgtatttattgggttttaatagtactagagatcaagcccagtgcccctcacataaaagatcatttactccctcttttccaaataaacattattgttaattatttaacattttcatatataatatagttttatcatatccaccccttactccttgtcctagcctatctacatccactctaccaactttgtatctcttttatgttgtcaagtatctgaaacccagtaagacacaaaacatattcttactactgtagattctgtggttagtctctttttgatttgtgcattcagttttagacttattaatcccagaaattatgaaagaaagcattggagtggagaagagataatagaacaggctatggcatgggaaaggaaaaaaaaggaagagtcaagtggagaaagtgaaggcaatgtaggagagaagagggcctgtgaagggataactaactctaagttgttttaaaaagccacatagaaatgtactgtcttatgagttccatatatagtatgcctttagctggagatacacctgccatgttgtcatcaatttgtttcagaacaatcttcactgttgtcttcctgcacacaatcaatgagtttgcccaaatgtagattagaaacccaaaactctatcgcaaataaccctttgtcttcataatttaatgatcacagttatttgtatgtagacaagggaagctccttaccataccatgctcaggaatataataaaagtaatgtttttttctcttctttctcccctgagcttggtactaggacaggcaaggaacaggctagaggagttctgaagttagctttcaaatgcttctgaaaggtttcttgacaactccagtgcacatatatgcatacaaacacatgcgtgtgcgtctgtgcacacgcgtgcactcacatgtgcacacacacacagctcccaacattttaaatgatagttaaagattaaagttacataatctatacagtctccaatctacttatgcaaactcttgactccaaggacttctgacaggacccttctctgatttatttgaaatgtattttaaacctagatgaattgttacagccatatagcacagctgttgactattttaatctattgatcattttctttgatagtacttgagaaatgtgtgattaggaaaaaatattttcagttccaaaaaattataatgtatttttattttctgagtaaattataaatacttgtaaatttccttcatgatcatttctagtcaatttgctctttcatttttcattctcaaacctcaatacactggaattagagatgagtaataataattgataatcatgatgatattattttattcaatctaggagtctggattcttttacttagattttactcttttgacaatttaaatttctctaatttttatgaaacatggtaagacaacctctaacgtggacaatttgataatgtaacatatgtaattcctcttttacttttatagattttttcttttgattaatgcattcttcagatttactatcctttacatgcatatatattattttacaatgaaattaatattgcctggtaatgtatctcagtgaatttttacacatacaaattcttataatcttgaatagaagtcgaatttgaatacttctaccactcatgaggcctcgctattcctcacgttacatggttccctaacacttagttggaattgactaataaatgtgccatcagcaatagcttttcttcacaagattgccttgtaatgaaactgccaggcacatgatcttgtcaaactgcttcatgtagaaaatattctcttacacagtaatgtatgccagtcttgaatatctccgataaatgattagttgatttttttttaattctagaaaaacataaaaatgtcctttaggtttctctctgtgcttctgagtctgttctaagacagggtctgtgactctaagatattaggaaatcattggagctgtggaagaaactcactgtcaccttggcaacacactgatttgtggtcttggctgtcaatccacaagttattttctggtcaatacatccaaaccccttattggaaagtgattagagctcattttaaagggattttatttctattaaaaattactcagaaataagttagactataatattgtatatgagtgaaagatatatgttatttccctgaaggagtaaggaagtgcaataaaataatgttttagtaacagaggaaatgtatgggaaacaaagttattgtatcatcatctttctcatttactcacaaaattccctacaaaagcagaggaggaattttattctgatctaaattttgaacaaatatgttccataatgcagaagacttgcataaacagaagacttgcagtgtttacagtgtcagaagcatttgtatggtactccaaatctccttggagtaggaagcaaatactagggaggaagtggggttagctataaatactcatcccacaagtaacaatgtatctcttgattagatgttcttccttgtaagatgctctcacaatagtgccactgactggtcatcaaatctgcctatagggaatatttcctattcagaaagtagtgagtatgtcattagaatgttaagaaaaaggccttagccaaacatcgttcatgtagagagcttttaaattaccagtctcaggaatggtttctggaatacaaagaaggtctcaaaaatagcctatatgattaggaaactactaaaatgacaacaaaaactttagcaggaattaatcaagagatgggtgaattgaggaccgcagttttgcaaaaaaacctgctgtagattgctgctcaggcataatcttgtttgtcaacagtctcctgtcatgttttgctttactatgtgagacttttctcatattcttgatggtcaaagtattgatttgcataaatagacagacaaaatctctcaagtaacctttttatcattgaatagccattttgtttaaggtggcttttcccctccctcaaacctttgttagctattcttataattctcttacacttgcctttatttactagactagcaatagagtcaatgctttcaaccctggcctctatcacagctgctattctcttctttaaaagttgaaagggaaatgtagaaggcacaatgttcttggacacacagacaagcactagagaaaccaaaaatgttaaacatgcagaataatggaggtgtttaatagcctagtgacctcattctatttgtatgaccgagaccacatcacatcttcctccagacctttaagatatcactaatgtcaggctatagaacccaactttatggaagatgttacatgcttatgaagagtctcaatatggagtacagtgaagtataaccaactttatcgcacacatgtgattgggttgtcaccatgaaactttttcctgtaattgtactatacttaaatgtgcctaagtaaatttcctggagccttactctagaagtttgaactaacactggctactgaatcattttgaacaaaacttagttcttgactaatgaggattctgcttgttttggtatttgctattgccatatgaggtaaaaaagaatagctctaagccacaagaacaagattcttatgtaacagactaataaattgtctagtgaaaatgtgtaccttgaagaccagattaattggattctctagttactattatttgtttaaaagtaactttatagttctgcctggtgctcaggtttagatgtgactggctatataaaatctagaactcttgttccttatgagctctcttttatatatgaaggaaccagcttcaggtaggcttaatgcttgtacttaaaccctgaagtttccatactgtgtctccacatagtaggctttggttctgttacacggttatgcccatacttacctatgatttttatacattttaaaccactttcacacgttaactgactgcatctaaaatgctcttaaaagtggttttctgaaaaagaaatattatgcattgatttttaaattttattatatttaggtagcacacaaaatttggttcctttgtgacctttttgtacttaaatgctgctttaccttcaacatctccacctgataattataccccaacatttggatttaaatttatttttatttaaggggctataaaacaaaactctaatgaattctgttaatttcccatccctcttttccagtggtatcaaagagaagcattcaagctttccaaatcttcaaggcaaggtgagcaagtcttagtctagtgtgacaaagacaaagcatgagggaaccaaaattatttaaattgggttgatagcttttcaatttacataaagcttttagcctgctgttatctttgcttttaccaatttaaatgcattaactccaaggctgattttaaattgaacgtttaaattaatgcattgtcaatttgtcgttatggtaaatgggtaaaaatgaagctagaagcatggatgtggagaaataatgacccactcttgatttgctattttaatccagatatgctctgcagttctgcatgttgccattacccatgtgaacctaatggcatctgaaaactggattggcaaagcccgttaacaagatgttcttttctaaagtgggagaacattgttgttcaaaaacaagctgcaatattgtgtaagacagacttggtatgcatgtggtacctctgatcactttagctaaaagcaagaagagaaggaaatataatgatcctaattagcatcaaatctaagctgaagtgattttcttttagctattcaactccaccttaaatgaaatatgaagtaaatggatggcagagtgtttaaacatggatgagctgcaaggaaatcagctccttgatgttttctttttcctgagaagaatttaagtgacatatacaaaaaaaaatttagagcagcaaacttaattttgctctccttgggtttgggtgtccccaggcaaggaaatagtaataatcaccccttttctgtttttgacattaaccattaacctttataactaaagttaaataaatgcaatgtcttttgggtcatctacaagtattgtgtacatgctaaaatgaaataggtacctttacaacatcatctatgacttagtagaactgccatgtcttgatacccctaaactagcctattgacatgattgtactctcttctcttcctcctttccctgatcttatttgtgtttatatacaatctctgagacagaacaatgcttctatcagatatctgcttaacatattctgtggatgactgtgcatgtcatctgtgcatatgtgtatccatgccccctccccccctctgtgtctgtgtgtgtgtgtgtgtgtatgtgtgtgtgtgtgtgtgtgtgtgtgtgtgtgtgtgtgtgtgtgtgtgattatatttgataagcacctcaaccctgtgcttcattccagccttccaggtctttctatccacaatgtgatcttactaaccagcacagccataccatgttctttcctgatgcttgaatgtggtatcaacagtatatattgaatgcaaatcagaatatgatagaattctgtgagacacacagtatttttctataatttttcagatggtaacagtagttgtaaatcatgagcatcttctgttacattttatattcatccaaacaagacatctcctctaaatcattttcctcacatagaaactgatcatttaaattgtttgcaagtaccattttccttttagattctttctttctgcttatagaacacctgtttacttgtgcctattgatatgttgatagcattttctgtgtcatcttcataattcagtaagatatgtcactctcttctttgggagagagtattcctatctagaatttcttcctttgtgtgtttggcatttacagcaattcctttccggaggtttcatcctaacgttctggtaatcagaagggcaagtatcacagcaatatgctatgattttattttctataccatgtaaagcctaagaaactgacttacttttaaatctgtccatcttcttgaatggatttagtactgggtattctgggtagggatgatatatggtaattcaattatataaaactctgatatttctgaatatcagaaatatctgcttgaactgattatgaggtcagagacaatgaagaggtaaccatgtcagggaactaggaaggcaattttaaaggtttcccatggtggtgtttgccatcagcagggcctttctcctcattcttcctcaaatccacctctttgtctccttgactattccacctgtgtactaccttttctttacttactctataatcttcatattactatgatataaatttgaatttccactgataatatattgattttttacatgacattttcccaaacttcccataatgttaaaatattcaaatgtattagcgagtcacacaacaactttaaactcaccacagacatcatcaaattgcttccaataaactccattaattttgtatctcattaccatttgaaaaccttgaattaagtctccattaattcattggctttccttttgaagctcagattttgtcagaaaatcttttattccatagtattagttggctttccacaacaaatactcaaggatcctaatgaacaagttgtttcagctcattaaatgtaaacataatggtttaagtttaagagaaataaaaggatgtcagtaatcagaatggcatatggattacaaccaagaggcacactgaaatgaagaaggatgaacagtcatagcatacaacatattttgatttacggtatttgcctgttttcggtcattttgttgttctttgcaacatcaaagactaattcagggttctatgactttgtgggtctaggtgttccaaataatatttatttctcctttgacatgtgatgggtgttactcagagggagataagttgctaattagagaagaaatgtgatgactaatactgaattaggtaaaacacctatagttgacagtaatattaagggaatacactgaggaaggtaacaaaccatgatgagtggggctcagagaggtgggtttttcatgtgaaatatgaggactccttatcactataagcagtcttgtcttagtaccatgtgaacagatagacccagtcttcttcccaaacagaaacacagtatttgttcagatgaccatcaacagctaatactgcagctagagtgtatggtcagattccttccctgcaagagttttgagaaaagttagttgaaatttgcttctagagcagcatgaataacattttcatgagaaagtggaaggagctcagccctactaaggttgggagaggactgtgtctgctgtgtccctggagcagagacatattctcttcattctcacacttgctgtgagggcatgctagagtagctggcacagcaatcacctgctttctctgcagtcctggaagtgttcttggagaaggcatcactcataccctgtgaagtctttttattcacaatgaagggaatgttgtccaatcagaacagaggacctctaatgggactatgttaaagattacaactgaagacagatgctctgacccaatctgctctctcctccaaaataacactgatgatgtttcccctcccccagaataagtcaatgagtactaggcttaaaaccagattttgatcttagaaaaatattgggcaattttcaatgtacacgtacacatttttagtactacatataataaattttaacttgtgataccgctaaacaattgttttaaagcaaaagatacacatttttagtaataatatacctgttattttatttcctgaaaaatctaaagattataatatatatgtatattttaataataagaatatacattttaacatgctgtgtgcctttttgatacagccagacaagcttacgggaaaaacatggaaagaaggctgcatggaaatctctgtgggagcagcatcagtatgtggatggtagtgaccttcggaaaatcccgagaaagccaatgtaatgggcagtgatgaaaacacagaaggatagaagaaaaggaggcaatctccaaaatataataaaagataattttatttagtaatgcaaggaacaaagaaagccattaataatgtcaagtaatgttaaaggtgatcagtttggcaacactaataggattttaattacaacaaatttcctaatatattacttatttaattttatactacagattaatttcaagactgacactagggagatgatttgacatgacagaggtgacagtggtgactgtcattactctttagggcctgtgattgccaaattcttggtgttaactggagcctgagagctcactactttcaaaaattaccctttaggtatgcaatgatctgttcttggtgtcactacatgaagttaagataaattatacacaaatcaagtgcaagattcttttgtgaagaaataaacaggatatatgtaatgcacaatcctgatgctagagaaatattcaaacacaatggcagctgacacataggtactgtaaaataaatgtcctcagtcatctagatttccactataatatgtaaaatgtccacgtataacaaaagtcttaagcagaccatcagtagatactaccattatttctccaaatgaatgttctgtttttaacctacatatgctattaagtggccagcgtggttgaattgctttttttcttttagactattcaagtttcaaagaattttgaatatctttacaaacttgtacctgcacactttgacttagggtttttttttccttcattttctatttgaattagaaacaagattgatttacatgtcaattccagttccctctctctcccctcctcccctgccacaccccctaactaacaccctacatatcccatagactttcttctctcctgggaggatgaggccttccatagtagggtcttccaagtctgtcatattctttaggatagggcctaggcccaccgcatgtccaggctcagagagtatctctctgagtggattggtctcccaaagatcattcctatgctagggataagtactgatctactacaaagggcctatttagttttttttttttttttttttttggttttttgagagagggtttctttgtgtaatagccctggctgtcctggaactcactgtagatcaggctgtactgaaacccacagagatctgccttcatctgcctccagagtgctgggattaaaggcatgtgccaccatcacctggcctttgatttagtaattttgcaatattgtctgagtgtctgcattgataataagttcacaggtcatagacagttttctgtgttgtaggctatcttctgtaaagaagaaactttgaaaagtagcttgctgaacaattgacaaatccattttcttggttttgagaaccaggatttttaaaaaaaacttcacttgtacaaatattatttatttctatatatcaaactcacaatttcttaaagaaagtatttcacatcaggctagtatttcacatcatttgtgactctgactttgagaacatcatgagtggccatcaagatggattggaatgtggctatctggaggataactagagtatgtgtttccatgggctgtagcagagctgttcctgtggttataacatatcttcataatacataatcagactttttcctgagacaggaaacgaaaagaaagtaaagttacttcccattacatagatttgactgtcatgcacttacatcaagtctgggtataaacaatagtagcatacccaagagcaaactgaaataattaatattttttgtagtcatttaaaaatttaccagatggtgcaaactggccaactgtttgtgagtatatgactatgcaaaaatatatgtattgatgagtataggactatgcaaagtaaacattttaagagatgaactaatgaatgagtgcttcaaggtgagcttacttcatttatcagatgaataaaactaattttacccagtaataaatctattctacttttattttttcaatacctgaatgttctactacatattaaagaattcgtgcctttagttcattaaatatagaaatgataatttatttttaaatatatactgcattgtattgctagtattactatcaaatgattaatgtaaaacatgacatattttctgcacagttctgaaaaactcatctatattttatggattagtaacataacagagatgctcagaatactgatttatataaattattctaggtagctgtggaattaaagtgtttttttttctaattgtttaggaggatgaggacataatgttgaagatgtattggacaagctctttatgaatctagtaatggactatgccacattttccagaaagattttgttaactattccacaatagatgatcttcaaagcctgtattcagacatagctctgatagacagtcggcaacttggggcactaggagcctgtgacctttggtcatgaatctctgtgctaagaaacatgttcctaatgagatcataaatttcttgaatacagtctgtggtatctaggacattaatttattgtttttgttgtttgtttgtttctatagctgactatttaggtcttactcaaattcatgatttgagatcttcacggtggattgtatggttacacatggttacatatgtctgtagaggcaagaggagaagtagtagttacaagtggttgggcatgagtcaatatggatgctagaaacttaatgttgaccttccacaaagtaatacatactcttaaccatgcagaagccttgactgctgaatcttgtatgaactcattaatccttttttattagaataataatgccttttaaataccaagtgatatgacacaaccaaaactaccatgtcagttctctcttgctgtcattgatgtaaagaagctatgagctataactttcagtagttttccaatatgctgctttgcgcagatatgtaattatttgttggaaaaatcagttcaacatcactgaacctatttcttctgatagaaaatgaaaatgaaagtccttgttctctaaaactgttataaggaactatgaatacaagtaaattgtttagaaagcagcctaggccataaactgttcacagtgagtgtatcattgatggccttgaaagctaagccacacaggaaataaattcagttaggagggttatactttcaaacatactctgaagtactcccattgaaagtttgagcctcaaactgaattcattgtttttctcattgctgtattcaccaaaaaaaagaaaggaagaaagaaaaaaaaagtaagaggaaggaagggaaagaaaggaagaaaagaaataagaaagagagaaagaaaggaaggaaggaaggaacaaagaaagaaaagagagagaaacagaagagacttaagactagaagatgttctgggcttatgatttgaaagaaatgtccatcactcagggaaggctattatgaaaaatctgccaaaagctgcctgagttctacctccacgtgggtggtctccaccagccacccaagttctgcacaccacatagatggacaaaataatacacagacttatattaggttcaaatgctgtttggccaatgactaggatttctcatcttctagctcagtcttaattatcaaaaatctatatatattataagacttatcagaagctttccattggtgtcgcccctttctgatggatcacattgcaccactggaggaagagcnnnnnnnnnnnnnnnnnnnnnnnnnnnnnnnnnnnnnnnnnnnnnnnnnnnnnnnnnnnnnnnnnnnnnnnnnnnnnnntatgtcacttcctgcctggatcaccacttctctactacatttcccagaatcccctttgactcctagtcctaccaaacttgctgtctcattggccaaacagtattttatttaccatccagtaagacaaacatacacagaagcacttcccccatcatctccatttttctgtctaaataaaaaggataacttatcttttataataactgaagaaaactaaaaccataactatctgtcttcaactctatcaaagaccacagtaggataatatataaactctagaattgacaggacatctcgctacctggacagtcacccaaagttcctctgtaatgttggggcgtcattcttcagcctacaggccacagtgtgtctggaacacttctccatttcaacagaaacccttcagaactgtcttgttttgtaagttcagcagtcactttcttgtgnnnnnnnnnnnnnnnnnnnnnnnnnnnnnnnnnnnnnnnnnnnnnnnnnnnnnnnnnnnnnnnnnnnnnnnnnnnnnnnnnnnnnnnnnnnnnnctaatcttgccatgttgaaagcaaactccataacaagtttcttcaatgcccatcctcctttctgacataattggtgtgacaggagcagttgtgtctcactgccaagaaaaaccctaaaatattttaatgccatctttctgtaggtctttgaaaggtttgaagaatacctacccatctcaaatatatctctgtatatctagaaaacctaactaacataattataaattctatcataggtgattatataacctgtatttaattatgcatatggaagctgctacaatgcctctcagcagcccgacaggtcaggctgtggcagcagatttccctctttctctgggaacctttgggcatggggtcatcccactcctgacactagataatgtgggaaaattaccaatacagagcctgataaaaatacaagggattttaatagggaaaaagccttacttacagagggacctagccaactggtgtggcagcagtctgtacagcaagccgaaagcgaaacctaaaacaaaaccagccacctgaatgcccctcactatacatcatcctgaccatacccttgtcaggcacacctgtagccagcccctaagctggtgtggctacagtatcccttacagaaggcatcacagagggtgttagaaatgaattcaactaattggcttgtttcctcttccctcagttttattcacaatggaccttagtatagaagaaacatctactcacattcagtgggtgtcttcccttcccaacttctctggaaacatcctcacggatgtgtacaaactagcatctccaattctaaatccagccaccttaacagtggagatttgtcttagcagaaacagtcaaagctgggccttgaaggacgtgattggctgatgaaggcttggacctcagcaatggattcagataatgatgtgctatcgaggaaatgcactttggatatggctctgtttgctttggtctttgtctcataatctttgtttcctgacctcttttctcactctcttgctctctgctttttctaatagataaaacacacaactccaagctactgtgtgcctccttcacagttttctgctttatcaaaatctaaggagatgaggctgagcacctgtgtactttacttacaaggccaaataaagcttttctgtttttgaactttttcatacaagtctttgtcatagccacagaaatcaagcatgacatttttcctagttttcaatcttatttgttctctgacctcaaaaaaaaaaaaaaagaaagaagggggaaagaaggaaaagaaagtgaaaaataaattagaaagccaattcttgctctccatcagaaatcagcaatataattaaagtgaaatgcatttcacactatgttcctgtagaggatctaatgttagaatatagtttatttgtgccatttgtgaattggctagatttgaaggaaatatcatattaattcaatagctttaaatgccagagatccgctcatttggtgagaccacaaagcacccagcaagctcctgacctacagggatcacttcatgactgaaatgacgccattttcagggctgatagcaggagccaaggagacactctgcacagaacatatggaatcacagtagggagagaaattcttttggcaaagtagagcatagagatttctacatttatgaaatatgccttcaatgtcttaaaagctcatttataagccaagataacatgaaagaacaggataatttctagccagactaataaataccaaagctttaaggactacataacattcaagaaaatcagcatgttgcattgaaataatctctcgtggaagctttatgtgttcaaaatagatttattcaagcagatatcacttgtttgtgctttaagaattccagactatatttgcagcaaggtgaatttctttgtataaatgtggatgaacttttatcactgacatgaatacagtagatcaagtagttccttgcaggtgcatttccacctctcagtgcaaaataacaaaagaaataatagaattttcaagttatgtcaaggcatcagtgtgttaatggtaacatgtgaaggtgagtgcatttcagcagcagggtgctgtgcagaacactgcagagaacctcttcataatgggagaatgcatttgctttgaagggaacagaggtgccttttttccttttccatacactcatgtttggatgtgaatcagtaatttcctggcagtctcacagcacacttgtcctgggattttcaatgtcaggcattataggattcctttcctcaaagagtgcccattagaagttgtcagctgctttctggtagtttgccaagtgaatgaatgtgcctttgattttctatctgaacatacagttttacatcttctacaattaacctgtcagtctagcatccccaatgatatttcatccatcaatactgtgtccatgtaatgggaagtatattaaaagctgtgaactccagtagtgatacttgcacatttttcttttacatacaggtagttttcctcacacagcaaaggacaatttattttttggtatcatgtgtgttgtttaattatgtacctaaactatcattacacattctagaaaaacataaaagaaatccactatagcacctgttagattcatgatcaggattactggagctaggaacatctagacaagaaaatgaggaagaggtttccagtaacccaagttatacctgatattgataaatgagcatggcattagttgtacaatcaataagtgatcaaatagtgtagtatgctaacacaaggctaacagacccagttaattaagattttatcataatttatcatattcttcaaatgcaaataagcctatgtttaagtttgtgagcatgagtagccaaaaatatgctccatagtcactaagcccttcattagaaacaattacattagaaaaccttcataaggaaggatcaaacattgtaaaattggcaattcatcttaagtcacttgtttagtcttagtaattttcttttttctttgcttttcttcccttcccatttcttatttgctgccatttttgctattgctattgatggtggtagtaatgtcagtttggaaggaaaggactcccctgattctttgttgtagtgagatctacagggtggatgatagagacatagaaagtgagcagaagtaaaagcctggagccttggtatcatttactttaaaaattatgggtacagtttgggtttgtaacaaaataaacagttatgagaagaaatctaatttcccaaagcatctctacattagaagtatgtaaaatttagccttaaacttccccaacctacagaaagatatgcctatgaaagtacaagaagcttataggacaccaaacagactggaccacaaaaagaagtccccccgacacataataatcaaaactccaaatctacagaataaagaaaaaatattaagagctgcaaaggaaaaaggccaaataacatataaaggcaaaccnnnnnnnnnnnnnnnnnnnnnnnnnnnnnnnnnnnnnnnnnnnnnnnnnnnnnnnnnnnnnnnnnnnnnnnnnnnnnnnnnnnnnnnnnnnnnnnnnnnnnnnnnnnnnnnnnnnnnnnnnnnnnnnnnnnnnnnnnnnnnnnnnnnnnnnnnnnnnnnnnnnnnnnnnnnnnnnnnnnnnnnnnnnnnnnnnnnnnnnnnnnnnnnnnnnnnnnnnnnnnnnnnnnnnnnnnnnnnnnnnnnnnnnnnnnnnnnnnnnnnnnnnnnnnnnnnnnnnnnnnnnnnnnnnnnnnnnnnnnnnnnnnnnnnnnnnnnnnnnnnnnnnnnnnnnnnnnnnnnnnnnnnnnnnnnnnnnnnnnnnnnnnnnnnnnnnnnnnnnnnnnnnnnnnnnnnnnnnnnnnnnnnnnnnnnnnnnnnnnnnnnnnnnnnnnnnnnnnnnnnnnnnnnnnnnnnnnnnnnnnnnnnnnnnnnnnnnnnnnnnnnnnnnnnnnnnnnnnnnnnnnnnnnnnnnnnnnnnnnnnnnnnnnnnnnnnnnnnnnnnnnnnnnnnnnnnnnnnnnnnnnnnnnnnnnnnnnnnnnnnnnnnnnnnnnnnnnnnnnnnnnnnnnnnnnnnnnnnnnnnnnnnnnnnnnnnnnnnnnnnnnnnnnnnnnnnnnnnnnnnnnnnnnnnnnnnnnnnnnnnnnnnnnnnnnnnnnnnnnnnnnnnnnnnnnnnnnnnnnnnnnnnnnnnnnnnnnnnnnnnnnnnnnnnnnnnnnnnnnnnnnnnnnnnnnnnnnnnnnnnnnnnnnnnnnnnnnnnnnnnnnnnnnnnnnnnnnnnnnnnnnnnnnnnnnnnnnnnnnnnnnnnnnnnnnnnnnnnnnnnnnnnnnnnnnnnnnnnnnnnnnnnnnnnnnnnnnnnnnnnnnnnnnnnnnnnnnnnnnnnnnnnnnnnnnnnnnnnnnnnnnnnnnnnnnnnnnnnnnnnnnnnnnnnnnnnnnnnnnnnnnnnnnnnnnnnnnnnnnnnnnnnnnnnnnnnnnnnnnnnnnnnnnnnnnnnnnnnnnnnnnnnnnnnnnnnnnnnnnnnnnnnnnnnnnnnnnnnnnnnnnnnnnnnnnnnnnnnnnnnnnnnnnnnnnnnnnnnnnnnnnnnnnnnnnnnnnnnnnnnnnnnnnnnnnnnnnnnnnnnnnnnnnnnnnnnnnnnnnnnnnnnnnnnnnnnnnnnnnnnnnnnnnnnnnnnnnnnnnnnnnnnnnnnnnnnnnnnnnnnnnnnnnnnnnnnnnnnnnnnnnnnnnnnnnnnnnnnnnnnnnnnnnnnnnnnnnnnnnnnnnnnnnnnnnnnnnnnnnnnnnnnnnnnnnnnnnnnnnnnnnnnnnnnnnnnnnnnnnnnnnnnnnnnnnnnnnnnnnnnnnnnnnnnnnnnnnnnnnnnnnnnnnnnnnnnnnnnnnnnnnnnnnnnnnnnnnnnnnnnnnnnnnnnnnnnnnnnnnnnnnnnnnnnnnnnnnnnnnnnnnnnnnnnnnnnnnnnnnnnnnnnnnnnnnnnnnnnnnnnnnnnnnnnnnnnnnnnnnnnnnnnnnnnnnnnnnnnnnnnnnnnnnnnnnnnnnnnnnnnnnnnnnnnnnnnnnnnnnnnnnnnnnnnnnnnnnnnnnnnnnnnnnnnnnnnnnnnnnnnnnnnnnnnnnnnnnnnnnnnnnnnnnnnnnnnnnnnnnnnnnnnnnnnnnnnnnnnnnnnnnnnnnnnnnnnnnnnnnnnnnnnnnnnnnnnnnnnnnnnnnnnnnnnnnnnnnnnnnnnnnnnnnnnnnnnnnnnnnnnnnnnnnnnnnnnnnnnnnnnnnnnnnnnnnnnnnnnnnnnnnnnnnnnnnnnnnnnnnnnnnnnnnnnnnnnnnnnnnnnnnnnnnnnnnnnnnnnnnnnnnnnnnnnnnnnnnnnnnnnnnnnnnnnnnnnnnnnnnnnnnnnnnnnnnnnnnnnnnnnnnnnnnnnnnnnnnnnnnnnnnnnnnnnnnnnnnnnnnnnnnnnnnnnnnnnnnnnnnnnnnnnnnnnnnnnnnnnnnnnnnnnnnnnnnnnnnnnnnnnnnnnnnnnnnnnnnnnnnnnnnnnnnnnnnnnnnnnnnnnnnnnnnnnnnnnnnnnnnnnnnnnnnnnnnnnnnnnnnnnnnnnnnnnnnnnnnnnnnnnnnnnnnnnnnnnnnnnnnnnnnnnnnnnnnnnnnnnnnnnnnnnnnnnnnnnnnnnnnnnnnnnnnnnnnnnnnnnnnnnnnnnnnnnnnnnnnnnnnnnnnnnnnnnnnnnnnnnnnnnnnnnnnnnnnnnnnnnnnnnnnnnnnnnnnnnnnnnnnnnnnnnnnnnnnnnnnnnnnnnnnnnnnnnnnnnnnnnnnnnnnnnnnnnnnnnnnnnnnnnnnnnnnnnnnnnnnnnnnnnnnnnnnnnnnnnnnnnnnnnnnnnnnnnnnnnnnnnnnnnnnnnnnnnnnnnnnnnnnnnnnnnnnnnnnnnnnnnnnnnnnnnnnnnnnnnnnnnnnnnnnnnnnnnnnnnnnnnnnnnnnnnnnnnnnnnnnnnnnnnnnnnnnnnnnnnnnnnnnnnnnnnnnnnnnnnnnnnnnnnnnnnnnnnnnnnnnnnnnnnnnnnnnnnnnnnnnnnnnnnnnnnnnnnnnnnnnnnnnnnnnnnnnnnnnnnnnnnnnnnnnnnnnnnnnnnnnnnnnnnnnnnnnnnnnnnnnnnnnnnnnnnnnnnnnnnnnnnnnnnnnnnnnnnnnnnnnnnnnnnnnnnnnnnnnnnnnnnnnnnnnnnnnnnnnnnnnnnnnnnnnnnnnnnnnnnnnnnnnnnnnnnnnnnnnnnnnnnnnnnnnnnnnnnnnnnnnnnnnnnnnnnnnnnnnnnnnnnnnnnnnnnnnnnnnnnnnnnnnnnnnnnnnnnnnnnnnnnnnnnnnnnnnnnnnnnnnnnnnnnnnnnnnnnnnnnnnnnnnnnnnnnnnnnnnnnnnnnnnnnnnnnnnnnnnnnnnnnnnnnnnnnnnnnnnnnnnnnnnnnnnnnnnnnnnnnnnnnnnnnnnnnnnnnnnnnnnnnnnnnnnnnnnnnnnnnnnnnnnnnnnnnnnnnnnnnnnnnnnnnnnnnnnnnnnnnnnnnnnnnnnnnnnnnnnnnnnnnnnnnnnnnnnnnnnnnnnnnnnnnnnnnnnnnnnnnnnnnnnnnnnnnnnnnnnnnnnnnnnnnnnnnnnnnnnnnnnnnnnnnnnnnnnnnnnnnnnnnnnnnnnnnnnnnnnnnnnnnnnnnnnnnnnnnnnnnnnnnnnnnnnnnnnnnnnnnnnnnnnnnnnnnnnnnnnnnnnnnnnnnnnnnnnnnnnnnnnnnnnnnnnnnnnnnnnnnnnnnnnnnnnnnnnnnnnnnnnnnnnnnnnnnnnnnnnnnnnnnnnnnnnnnnnnnnnnnnnnnnnnnnnnnnnnnnnnnnnnnnnnnnnnnnnnnnnnnnnnnnnnnnnnnnnnnnnnnnnnnnnnnnnnnnnnnnnnnnnnnnnnnnnnnnnnnnnnnnnnnnnnnnnnnnnnnnnnnnnnnnnnnnnnnnnnnnnnnnnnnnnnnnnnnnnnnnnnnnnnnnnnnnnnnnnnnnnnnnnnnnnnnnnnnnnnnnnnnnnnnnnnnnnnnnnnnnnnnnnnnnnnnnnnnnnnnnnnnnnnnnnnnnnnnnnnnnnnnnnnnnnnnnnnnnnnnnnnnnnnnnnnnnnnnnnnnnnnnnnnnnnnnnnnnnnnnnnnnnnnnnnnnnnnnngccctgccgggggagtggcgggtggatggggtggggggtaggttggaggtaggggagaaggaatgggggtggggggagggagagggaaagtacatgtgaaaatattaataatttaataaaaaaaagaaaaaaaatccttacagaaaatttgatgctaattcatggaatattacaactggtagtgttgtgacatatatcaattcagatgaattgatggatgatttagtaatttgccactttacttaaaggaaatatattaagtatcaattattgaacagattttaaagataggaccattggaagacttcaagcttcacagatgataaacataaacttgtggctcaaatgtaagataggggacttaagtcctgatctttgagttcacctcccaagtctttcctaaaattcgtcagtggttcctcctctggagtatgaaataacaaagaacactgaagtctctatatttcccatatgattttaaggtttctttgattccgtctttacataccactgatggttttgtgaatacaggttgttggttgcctgcacatatgccaaaaaaatagtcttggattctaatggaaaaagtttaaactgtgacaaatacactaaaggttacaagctactcatggggaaagtcctgtgtatatgtttgtcttattggttgataaataaagtactgttggccaatgcaagatagatgggactaggacttgaggaggattctgggaagtgtagtaaagattgtgatgcaggcaggaagtgacatagcaggcagactcagagtataagcagggacaagcaggaagtcattctcttcttcttgctctctgctctggagccaccatgtgatcccagcaagagaagatgcctgccactgctgtctgaacagataagtctttataaaatatatagattaagaaatcctagtcattggccagcagcattgtatctaatataagtttctgtgttattttggttgcccacgtggcagcagggcttgggcagattggctgaaagatttattgttacaagctacccctcacatttttatcatggctatgtgtctgcaaatgaattctaggtaattccaatgattaacaatgtgactactccatctatgtgtaagatatccacaacctttacaacagctacctgttggctatgaaaactgacaaacattatctgattcttattatgagttggattaggttttgttaaaatcaccattgtttaatttacaattatgaagaaactaagagtaaaatcattggcaattgtattaatgacaccttggggataaaataacctcattacaaaattgtgcatgtcctctacattcagcaaattacatataagctaatataatagcttctcacagttcagctggctcagatgtcagtaaacctatttctggagtgatttggcctccagcaatgcatcatgagtgaaaaatgattgtgatttccgtcagcctgtcatcaaggaatgctcatttcttgagctactaatagaagatggacaacatggcaccaggttattgtcaccaattctgttatatccagaatatccagaatcccctggagcaaagacattcgagaatatctcaaaatttaagtacaggaatatctgcaggatggtttctgtgtcctctgagtcttggcagcaatgtgtgttgatttaccatgtgccttgagatcatggcatgccccattggagcttggtctcaaaggcatcttcagttttatattatagaaaaaagtcacaaattttgcctttggcagtgacaacacttgaaagcctctgtctgcagaaaccagtcatttagattctaaggcaaataataaaattatagtaaataagaagtacttgaatgacccataataattgaatatctttccagattttttaaaaaaatatatgaaaacaacaaatgttttgcaaattgttacttataattttatttaaaacatttctatctcttctttttaatatgcttttaaaatgcatgaacatttgccattttaaattgttaaggtgtttctaaggcatgtataacaaatataatttatataattattgccaaagctacttttaatgacagcgtatagtaagacaagtcactagatggcttatcacaagaaatgacaaataaaattatatagtctccatcaggattctgttttcctattataggatgcttcccaagtggcagccttcagggcagttctgtgagagataaagaataaaaggaaaggagtgttcatgacacttaggacttaaaaatcaaggaagataagccacgaaaatagctgtaatctattttaaagtcagattagtgtctatttctgagcttctgattaaacttggcaatagttcacatacaggagataggttataactctgaccaataagtcacatgatcatggtaaaaagagaaattagcaaaaatgtaattgggaagccaggaacccnnnnnnnnnnnnnnnnnnnnnnnnnnnnnnnnnnnnnnnnnnnnnnnnnnnnnnnnnnnnnnacaatttagacaattgtggagcattcattagtatcaagcaaaattagatttacatttctgtttatttaatcaatggagatgatgaaattaaactgtgagcttagcatggattgtaggtttggattaccttttgatataagacaaaagtgcacttaaggctgtcatttcctcacgatgtttttgtattcttttaatttaatcttttcatatagagatgcttcattttttcttttttacattaaagtagtcactggtagtatttcattaatagtacactgtcacagaatcttacctagaagtgtttcacgttcaaaagcattcaagattctttaaaaataaacactatctgaacataaagtgctacatacattgatatttgaatttacatcaatagaaaagctcattttatttaaaatgatattagagttataggtgtatatacatataatgttccaacacaatgaaataaaataccactcaaaacccatatcatgtacaagaagcaaagagaaatattctagatcttatattgtcttcaaattttatcatgtatgcttcaaagtaaactgccatcttgatgtaacatagattcattttgctgaattcaatattgcctatgtggtgtctttcaatgttacccttttagattcaacttccttaacacagttatacttatgaaaagttatcgttaattcagttatgtttttgaaatgcaatcataagttctctgtagatttagtccagtctgcttcaatgtaatattactaaactgtgagtgcacacactgatggttgtctactatgcagatgagatttagtggctacttgagtctgcatctcttgggagtatactactgctaactttctagcaggaatcatattgtgttacactttaaataataatttgtcatttactgatgctgtctttctcataactaccttttactgaattcttttctatttttatcttattttttctagttttgtgtatcatcatttccatatttattacctttttcactgaagtctatctctttctattactttttttaaaatttgtgttatcttttgcaaacatattttcattttagtttctgttatgattaattttagatatcactttcacacaacatagaatcacacaggaaaagagtctcaatgggaagtgtctattttaggttactctgtaagtatgtctgtaataaattaatgtctgtggcaacacacaggaccctgtgggtggaaacattcctaggcagggatgttctagactggactagagtggaaaaatctacttgagtacaagaatataagcaagggatcatctgtgcattgattgctctctgttctgtatggtgggtgtgaagtgactagctgttggaagttccttcacctccccattttctgattggaaccataaaataaaattaacccctttattactaaatgaagcttttggccatagtaattttatcacagtaaacagaaatgaaacatgggaaaaatcttttgaagcatatttgttttagattttgttctccttaatgcaattatgatttctcctatgattgaatgtagccacagatttcagacattgatttgttttcagatacccatgtcttatataagaactagaatatggttcttgctcacacaaaacatcctgatgtacaaatgctatttcattatttgtcacatagttcatcttcaaactacttcaaattacaaatttaactctgcagtgtggtttggatttcataactcatttcatttttattataaaacattccgtgtttcaaaactgttctgaaatttaggagattaagtctttgtatatcatgaatgaagagaagatatatgtatagatagatagatacatagatggatgtataatggtttcnnnnnnnnnnnnnnnnnnnnnnntgaataaaatgaaattcacaaagtcttttacctaaaataaatttgttcaatctaaatgactaaagcatctgaaattccccctgcctttaaaaagaagaaaatagaagagtgtgatccagatatgtatataaaataaaacaaaacataaatctgctgtatttgttcgagttttattttttatgacaatagacattgcagtttcagaagtcataattggattgcactcttgggaacttttcatttctacctagtgaaccatttgatcagttttcagggaaaaactgataaacaaagtgttgtttgaactaaaacaaagctactgtcctataccagaaccatattgtcaggttggagcagaagtactaggagacttctcttccatcaaattcatgattagctcagcagtttccttctgtctacctgtccctatgtcgccctgtctcactctgaccacaatcttatttctgagaataaagagtaattatgcatcattgcagagttgtatgtttatcaacacagggtaataaagaaaaatgaacatatttcacaggtgagaaagaaaacaagaggagactatatttgaaggtgaagatcagaagcacagatgtcaccaagaaatgtgatttatgatgaattagagtaaacaaaagacattgagcaattgcaaggtatttgtggaactgagttgactacaattactgtacggatgaagaggggacaagatgtagtcttatgacataagaattccttggcaagcatctactaccaaggtaatgtatttaaacatttctacaaaatggagagcacagttcaaacagactaacacataatatgcagaaattttgtaagcaaagaaaatgatggtgaggaagtaaagaagagcaaatggtcttttccatcatcttcatctcctcctcatagcttccaatgtaatgtttaactttttgcataacaatgcataaataatgggcttggggcacatgggaaacattcttgtaaagttatttgcacttctgctattttaaattggctcagtgtggcacacagtggtgagtatgttttctagaagactccagtgaccttcacacttgcaagttcattctccttaagcatggacagcaatgctccactgatttgtggatgtcactaggctttgtagtcagtacgggatagagggagttaagcaaatcccccaagagacattgaaatggagttaataaccccattggctttcaagtgaaagtactgagttttggagtaacttggaggcgacttccagagattctctcaatcatgtcacagcaaggaactgatttttcccaacatctttgatattcttcaaaagtgttaataatcctaatccttgttgaagcagtgctcaattcattttgggatcagaatattgaattcttcagtagacagtttagtggagttgatacatgtattttctgatctgcttgatgataatagttatagttataaataagtaatacttataactaagtaatagttataataaatagcaagttgtcctaagctttaatattttttgttatagtgagaataatattttatataatattctgattatgacttttcttccccttattcttcctagttccccctgaactcccctgccatccagatccacaccctttctgtctcttcatagaagccacacacacatctgaggaatagtaataaagtaaaatgaacaaatacaaaaacaaataatttggaatgcaacaaataaacagtagaaaaagagaaaactaacatgtacaaatagctgctgggctgtggtgacacacgcctttaatcccaacacttgggaggcagaggcatctcccaaccccccccaaagaaagtacaaacactcacaaactcacatattcacacacacacacacacacacacacacacagtaatcccataaaaatataaaacacagagccatattttttaatataaatatatattaaagatatacagatgtatcttgtaaggttaaggggaaaaaaggccctgattcaacattataagatgagaaccacctaatatgagcttgaatctgttttgtgttggctatctactgttagacatgaggcctactattaagagtttaagagtatttttccccccagggagactcccttggataaaattaacttttcatcagcaagcagttatcatttggagatgaattctgcattaaacatggggcagtgtgtttagctaccctcccagacataggaccccatttaatatagactgttcaagatctatgcatgctgcctcttgctctgtgggttcatatatgtgtcaatcatgttctctttagaaagccttgttttcttgttgtctgtcaatatttacctgctcctctatcactccgggtttttaacattttgtaaaagatttactaatttcttacctgtgtgacaaactgtaagtccatcatatttttttaaatgttttacttctttcaatgacaataacacacatacacacaattaagcacatgtactgatagttgatattcaaacatcatgaccttgcttatgaactacactcatcgctgctttcacacagaattatgttacaatcttgtgttcttatttgcaaaactagaagtgtactaaattaattattggaagaggtttacaccattgttacccacaatgaatattatcaacatattcttgtttggctgttataccaatggcttcattcttatgggtgctttatacttccttagaaggacagaaaggaaatgaaccccttatacactcaggtccttgtcagttgcaaatcctcttgtgtttatgctaacatattcaagccattaaagctggctaattatatctggatttctcttgatatatttgctcatcaattttgaggaattcattctctacgctaaacttagccaatatcctttgtaaaaaccagctcagaagagataaatacaagactccagcctgcttccatcaatttcttctcacgctgtcatcttcaattttcttccgaccttgcacatttccttgaagatgtttcacggtgttgtttgttttctttgcagtagtcttgactcactttctttggcttgaacatctgttgcttcttcttatttcttggacagcattcattagtatcaatactaacttttgcttttctcctatcctgtgctaaattgttaaccatatgtgttttacactctcctgatgaagtagccatgaggctcttttcctgtccctagtcatggtcagactctgatttcattacgtctggatttttcatctttctattagcatctttgtatgagcaatcagagcttcctcatgagaaaagctctgcatcaatgaaatggagactgatgccattcttttctgatgaacctttcatgggacaatgtgtgcagaatgatagattattgaacactcccattttttccagtcactggatagagtatctcatctgccagtccccttcagtctcctgagagccagtagtatgtaccacctttgaagcaaccatatctcacattaaacatggagaacttttagcaactgaaggcagtttttgtgaagtaaatatcaatggcatgcagtggatattgacttgcaaatgactgtcattctactttgtttctatttacaactagtacagctagtacactaatggtgaaggaagattgttcctttcaggtagtcaaaggacatatgattatttcagcaagacacagtacattgaatggttctgaattataaagtaagatcaaccacatttgttttgaagttggggactacaaggaaatgacctcagatttaatataattattattagccaaatttactaactctgcaagcagggaagatgttagtaatcagaaatatgggtggggaaagatttttaaaggtgaacatcacaattactccacttacagctatatgaagaattgacccacttccccagctatgtaaggaattgtcattaccatttctcacagcaataatcatgtttttagttacacagtttagggcatggggtaaggggtcagaaagttttaggaaattagttcagaggccatcagctaataaagagggttactacacaaaatgaaatttgctttgtcaccacacatgaaagaaataagtcaactaagaatcctgtgaggatttttaatagctctctgccttcccaacaggcttatttctcctttcacatgacataatggctgctttggttcttattctgtttgcaaactaatgttttaatgaatgaaaggtaaataattacagataacatcaacaaatattcactcactgcatctatggcagcataaatattcatgtttgatgtgacaattactgttacatcagaggaatttacacaaatgaagcaacactagacatgcatgatgagtaaaaagaaaagtattctttgaagaatagtattataaatattcaaaggatagtgataactgtccttaggaacaaccaaataggaaaattttaaaactaattatcttagtataaaatacattcatcaggttgatagagatatataagaatacatgtaaaaaggaagaaatgagtttcaatttgattccaaactttaataggtctatagtagcgggttatgctattcagaaatggctatctctaaagatattgtagatagggtttattgctgacaaaaaaaatgattcaaagctgctcagggaggaaagatgtatttcagattatagttgtagttcattattgaaggaaatcaaggcaggacttcaagaagggaacctggggaaagaactcaaacacagactacaggaatactaattattgacttgctgttcaggctttctgagttttttgtatacaattcaggatcagctagatgcctaagggtaacaccacccacagtcgtcttctccctcccaaatcaatcattaatcaaaaaaatgtacagtagtcttgtccagaggccaaaataatagggacattttctaagttgacattctctttgtgaaatgaattcagcttgtatcaagttttcaaaaaattagtcagcaaaaaaataaaagccctgtcctcagtgtcaagccaaactagctcccacaactcttattattttccttgggaattctatttgtttgtttgcctttattttattgaataattttatacaacatattatgattacaatcttccactttctgtatcttcttagaaaacaattaagcatttagagaataattataaaataagcaaaatacgataataaaaaacaaataaaattggacaaaacacaaaagaaaaaagacccaaaaggaaagcagaagtacatgttttagacacacacacattagcatacaaaggaatcccaacaccagaagtcataatatatatgtaaaagacctgtaaagttgaaaaaagcctgtaatcaaacattgtgagagaaagaacctccaaagatgtcatatggcatccccataagaggagtttatttccccagtgagactcactttagaggaaactaagatttcatttgcaagtgattatcaagtggagagaggttcaggcttatggatggggaatttttctacttcacttatctgtaggatcccatctgatgcagaacagctcagatcctctgactgcttccacagttttggtgagttaatatatgcattggacctactgtgtttagaggccctgtttccttagtgtcctccattccctcttacttgtacactctgtcttctcttccactggattccctgaacactccgaggagggatttgagagagacacccatttaggattgaatgtttccagttctctttgttagtctctgaactttttctggctgttggtctctaattttcccatcagtgacaggaggaagtttatgtagtgatgtctaacaaaagcgctgatttataagtacagtaaaataccaacaggagtcactttgttgctataatcctttagcttaacagtagtgtttggttttcccctaggtccctagtctatctaatctcagattcttggaatcccaagctgtgtctgtctcatggaataggcctttagtttggttggttactcccattaactttgttccactatgcaccagcatatcttgcaggcaagacatcatttaggataaaatagtttggagatatgttggggtttagctttcttttctggtatcatgcagaatacccaaagccaatagcatggaggggtgaaggctctcttggtaagcacaagcttggctactttgttcagaattatataggtgttgtcctaaaaaatagggtcttataatcagtttgtgaagagcaaccaatagtctttctaatagcctgagttgtttgggagttcccatgggactttttgacccacaactcaggtgtaacccattcacagttttggtaagttcatctaatgaccagaaatgtacaattgggttttatttcccttgttatttggcagtttcatttagatcaccttcatatatacttatattttctggagcttctactatattggatttccttatgaaagttcaaatatctcttagttttagatgttcctccctatattccttcccttgttttcttatttcctccacttcccaattgattctcctattccagtccttccttatctatccatagttatctattctatttccctatcctatgaagctccatcccttccacttaataatttattctatatataaccttttttagttataccgacagtagcttgtttatcaatgacttatcagctagcatccacacataaatagaatgtactatatttctctttctgggtctgggttccctcactcaggttgattttttttttcaatttttatgcatgtctctgctaaattcgtttttaatggctaatattccattgtgtaaaagtaacacattttctttattgatccatctgttgaaagatacctgtttttttttttttaaatatctgattattatgaaaagagcagtaatgaacatggttgagcaagtgtctctgtggtaagttgaaacaacttctgggtgtatttccaagagtggtgtaacttaatcttgaatttgatcaattcccagtttcctgaggaaccaccacaaacaatggtttaatgttgtgctttccccatatactgaactgtgtatggtgttattcattttattcatcttagccattcttattggtataagatgaaatctcaaagtgatttttatttgaattttcctgatgactaagaatgttgaacatttttaagtgcttctaaatcatttgaatttcttcttttgagaattctgtgtttagaactgttctacatttttataaattgggttatttgttttatccatgtccatgtttttatttctctatatgctttggatattagccctctatcagatgtgtagttggttaaacctttttccatcttgtggcatgccactttgtccaaatgactgtggcctttttgctatacagaagctttatactttcataagatccatttattaattgttcaacttagtcaatggtgttctgttcagaaagcctttctgtgccatgggtttaagagtattccctgatttctatcaaattcaatgtttctggctttattttgaagtctttgatccatttgcagttgagttttgtgctgaatgctaagtatgaatctattttcattcttgttcatgcagccatccagtttgtccagcaccacttggtgaagatgctgtctttcttctagtttttatttcaggcatcttttaaaatattaagtgtaattataaataaatatctagtaaaatgtgtcacattagtagggtttgaacatattttctgtctctcatgttattttcagcgaaaaactgggttcaaaatagttgtctttcttcatttcaggctactgtattgagttaaaagcagatgtgcactccaaatcctaaaagaccacagcacctatttatcatatcaaattaaaaatatgcagatagttacttcacttaaaatattgcatcccagactctggtgagtagtccacttcctctagtactgccacttccctatggaacacctagaatacagttttctgttcttcacagtttcaattattctgttttatcaaagttccttttcatctcagcacactagatcttcctttccatatttaaactgttcaaaataatgctttaattattttattgcatcattccagtaccttccaactttatcacagtgttaacgtgttggataagcaaagtaagctttatctggaataaacactaacagatacaggattttttaatgggttattcattttaattgatagttgtggaatgaagttagtgaaatcaaagtttattatgaatgcctggccttagcttggattgcttctagcccttttatacattccttctggtcttttatctttctttcgtatgcataacttacttttctttttactccatggctggctggattgcttggtaactgagtgcctggcccctgatctcctcctctccttgtttctcctatttattctcactccctgccaactccacctatcattgccactgccttgctactacccgttcagcacttcattagtactaccactatgtgttttagacaggcatagtaacacagcttcacagagttgaacaaatgcagcaccccttaaacaaaagtcacaccccttaaaataatattctactacaaactaatatatcattaacaagaaatttgtgttttatcaaacaactactattgtgtcaatatagtgcttggttattaagaaaattggcaatggttttccttttgtcaagtgtgtatacatacatatattagatggccaaaaccatgactcattagctatgcccagtttccacattgagaaatatcctcctgagatattgtgtagtaatgttcaaaagccctcctgaagtctcaccctctatgtataggtaaaacatccttcaagggagtccaggccagcagtttatgtttctgcacctgagaatctagccaatatagctataatttaaaacatatatttgtataactcttttattgttgtattaatagagcataaaaacattgacagtaacaacaaaggaagctttgctaagataataaggttaggaatttctggttcttggaaacttatctataatattgattgcctccctttgtcacagaatagctgcatcaaataagatagtgtattttaggtatattgaaaactacacagtaccattcatgtattgattgctacttttactgcctaaaaatcgatttgttcctgttttactctaaaggagtcaggtaactatttaaaacacatattatcatctttaaaatgaacttaacactaatttcatgttcatcagatactttagagaagtatggagacaagataactgtagcttttataaacaagtgtgaagttcttactttgtttacataggcccttgcatgtctgtgttcgggatgccagcttttcctatttaccactagtggaactggaaaatgactttggaagcacagcagaaaatgagcattttgtcactctttggcagcctctggatttcatagtaacatatattccaggcacgaagaacagacattcatttaaagacacttaaagtgaatgtgatctgtggtgatgaagctgcctgaagctttgaagcccaagaaatgagaagaactatatttacaaaattggtagttctcagaagttcttatttcagtggtaaacttaagagatagatagctcaagtaggattaaaattaattcaaagtctctcttaccttctgggctgataacctattctgcaaagcaatttatatgtaaatattaatttgaaaaaaaagcacaagattattgggataaacacccagtgcagctgaatgtcagcaccatgttcaagactaaagtaagtctcatttgttccaccaactatatgccttgctttgtgtttggtggttgtttgtttcattctataagatgttaccatccagatgtctgaattccgattagcattgacttattcagacaaattgaacatcactgttctctaccttaatgataactaaatatcttgtctctatggagtttgaacagagggatataaagatgtccaatgccttgtacaattttctcacatacttgctaaactgagttgacggtgaatcaagaagagtgtattttagtgtgttaatggctaacttatttctgcaagttcactgtggttcttgtttctgggtctgaagaatctgtttcctcttaaacttgttaagtagtaattattgtgttactagttacataatgtggcaaatgagtcaggcataatggctatttgttacatatcaggttaggaggaggcttcttcagtttctacaaatccctatcttactttccagtcatttggataggagataaactgattccctaaaaggaattcctaactaaaccttgttgcactgtggcttagttaggaatgagagtacattactctgctatatgcaaattatattacttgaaaatgaccacccccttctcgatcactttctgggtctctcctccttttcgttgtctttgtttttctttgggtagaaagaagaattgtactttgcctccctgtctggcctcagactccttaatgtcctgcctcagtttatcaagtgctgggattacaggcatgtggactgccactaggtctagcttgtaaatatttttttttatatttttatttaaattagaaacaatattattttacatatcaatcccagttccctcctcctcctatgctccctagtgactcccctgccccctttgcacccctatccactccccaggtagagtgaggccttctgtgggggaatcatcaaagtctgtcacatcatttgtggcagggcctagaccctccaccatgtatccaggctgagagaatatctctccatgggggaatgggctcccaaatccattcactctctagggataaacactggttccactgacaaaagccccatagacaaacaagacctcttaactgacacctaaattcagggagcctggttcagtcctatgctggtgacccagctgttagactgggttccatgaattcccactagctcaggtcagctgtttttgtggggttttccagcaaagtcttgacccctttgcttacctcctctccctttgtacaactggattccaggaatttgtctcagtgcttagtatttgatctctgtatctgcttccatcagctactgaatgaaggctctatggtatcatttaaggtagtcatcaatctcattatagggaaagggcatttaaggtagcctgtctactattgctgagattcttagtcggggtcatcctggtggattcctagacatttccctagtgccagatttctcttaaacctataatggctgctgcaattaaggtatctcatttcttgctctcctctattctcttgaatcaatattcctaatcccgcctgttttcctccgctctcctcttctctcctcctctttctcctcccccctcccttcttctgtctctccaattctcccaatttgttcaggagcatttgtccctttcttttcctctggagaaacatgtagatctgttttagggttctccttgtttcttagcttctgcagatgtgtggatgatatgctagtaatcctttgctctatgtctaatatccatatatgagtgggtacataccatgtttgtgtttctgtgactggattaccccactcaggatggattcttctaggcccaacaatttgcctttgaatttcaaggtttaattggtcccccacaatgagtagtactccattgtgtaaatatagcagactttctttgtccactcctcaaattgttccacatgatagaagcagaagggtcattgccaaactcactgccaaactctttttatgaggctacaataccttggtacccaaaccacacagagacacaactaagaaagagaactacagaccaatatttctcatgaacatttattgaaaaatactcaataaaatattggcaaatcaaaatccaagcacacatctgaaaaatcatccaccatgttcaagtaggcttcatgccagggatgctgggatggttcaacatttgaaaatcgaccaatgtaatccaccacataaacaaactgaaaaagaaaaacctatatgatcttcccacgagatactgaaaaagcctttgacaaaatccaacactccttcatgataagggtcttggagagaccagggataacaggaacatacctatacatgataaaggcaatatagaacaagacaataggcaacattaaactaaatggagagaaaataaatgtgattcctctaaaatcagaaacaagacaagatccttcactctctccctatctcttcaacattgtacttgtaattctaacttgagcaataagacaacaaaaggagatcaagggagggtatacaaattggaaaggaagaagtcaaacttcactacttgcagatgatatgataatttacataagtgacccaaaaattctatcagggaactcctacagctgataaatgctttcaataaagtgtcaggatacaagattaacttgaaaaatcagtaaatattctttttatgagagaaatttattcagaatcttggtgtgtcttgggaagtttgtgtttagaatccttcttgaacccagaatttaccatgttttcctcatttcttagagtccaaaaactattaggtacattctgtttctactccatttatgcaattccaattaaaataccacagtatttttaccatgttagtgttactatattttccaaacatttagtgtgtaatacgtcctttgttttatttctagttcagtaattgcatttgtgcatatgtctactatactactgaaattaaattcaatagtcatgtcacactattgtctcattgcctcataaaaacttcttttctgaggctggatggtggtgttccacacctttaatcccagcacttgggaggcagaggcaggcagatctctgattttgagactagcctggtttacaagagctagttccaggacagcctccaaagccatatataagccctgtcaaaaaaactgaaaaaaaaaacttttaattttcacttcaatgaacaatatattcattttaaaatttaactgaaaatttggataaaactattttagaatccaggttttaactttttaaagaactttgtaagtattacatatcatgtgttctcatttatgtcctaagtctggttgaatttgtatgctagtttatttgctacaaagtcaatggcaaaattaaaattttgataaacagttgaaagccatgttgcctttgttgttctacacaggaggccatctttatgattggagttgaatccatttatacactgaaatgatctggctattgacttcagctctgtgaggtttcagttccctcctcttaaccagtttacataactattaataattctgtagtcttgcaaatggtgtgtcccttctgtgagtcatgcatgctagtgtccttcagccctttcatactggcaaagctcaattatcatgctattgtctcactgcattttgcacagagaagaccaaagcattatcagtgtctgtccactgtcccactttctctctgctcaaagttccacactatatacattccagctcttctgctgacagttctgttgtgactgggttcacaatctttttttgttcacccagtctttatagatgatcctttatagattattgttgggagccaggaaaatcccattaaggaatttctggaagtccaaacctccagagctctgatctacaattgtatttcggatgctagctgatttgctattgaatagcatggtctcagtggataatgtctcctactttgcatctatacagacctaagcatttcaataggcctgcaccagggcagagggctaggtgtacaggatgagtgaggacactgagacttaggaacgaccatacagaggggttgactggaggagagagaaatggccttgtggtcagggaagcacagttaggaaccagccagaaagatgctaaagagtctccagttttgcagcatggaactaagagctctctaaagatgacaagatgcctgtgtttggtctttattgcctttgggtcgctaggagtttccaagtccaccctcccccactcaggccaaacctcatggctactatagcttggggctgagacatgctgggccatgacatcagatgcagagaaaagcattagattttccaacttagatatccagaaatagaacctagactcttggttttgcaatattttgttattataatggctcctattacataattgcttcaaatttcagaactctgagaatagtcttcctccaaaagagagtggaatgctgtgtcatttagggcacccaacagtatacaaattgaataagttagtgaaaatttatgttcatttgaaaattccagtaagtaataattattatttatcattggcaaattattaagcatattgaaggcatacccccaaataaaccaaaatgatacaaacaagaaccacaatttttcggcaaaaatgtgagatattttaaccataaaattaatgggcatagtaaattaaaaataaaaataattactcaagaaaattctgatattcgatttctagtctctgtgaaattcagctacactcagttaagagctattttgtttctgttttcaaaatgaagatatgacatatctgggactgttgattttacatatacatataatatacatttatatataatctatttctgttggctttgatctagcaagtatgatagcacgcatttaataagctcaagaaagtctttagcttcattggacataaatatcacctagaaatgttacctgatgtgacccttgtcaggtgacatccttggaataaagccatgtgttgatgtgtcagttagttataaccttccttagactctctcttagtctcaagtgatgacttctaatacagtgtcttctgttcacattgcaagtatttatatttatgaataattgtctaggtctgcaccataaactgagagataaattatagccccagtctcataatcttgaaaatacaattacatggcttccttttccgttcaacatatacaaattgtatacctcttaacccatggcatgccacatatatcccaggagcaaatcatgaatgctgtgggattctgaagagttaccaggaagatagggtttaccctgggcttatagcattgatgataaatctagtttcaagtcccaatttgcatttttgttagttcaaagtatatgaatgagtttctgtattttcctatatatcatttttcataagtatggaaaagaatgacttagtcatatcacaatgatggtgtcagggtagatatgtgtcttgagtctgggaggcagaaattatttaaaaccatccagatcctgtttctactatacaagggctatttaaatataaaatataaaatatcccctgtgacttcatgaatttgatcactttgtcccaagcttctgatgctgttacaggagattgtgggaactagatggtggagcctttctggaggaagtgcataactgaggaattctaggtgttatagcctgaccattattatctctctgcttctcactgtctgaatgacatcagtctggcttccaggccttccctgtcatgacagattgtatttctctggaactataagccaacactaaccctttctcccctattctgcttctcaggtgtgttttatcactgtaacagaaaagaggctaatgcagacagatgaggtttatttccagtaatgtcacagtaactctgtgtatatctatttctctaacctatgccatacatattctctaagcggacatcaaaattgataacatcttttgtgatatataagccttgcagttttggaaagccctgccaagtgatatgatttttcttctctcatatcagatcaagaatcaggtatttgattctgacatctcaggatgtctgcctagtaactatcattgaagctcatggaaagaatagtatcttcagctacaaaatgttgcagtgttttattttacttctttgtcttcctctttgtccttaaagctcaggtgcctttcttccttttctaattgtttaggattacagaatgtgtagtttcattttagttatatagagaaacagacagatgataaagacaaaaaatgtttataatatatttatggatggtgatttctctcaggtaatgttccttgcagctcataaggctaatgaagtacaaacactatactagatgcttttattctctaagccctttgtgtactctttcagtaggacccactaatatcttgtctcaatacaacatatgtggttttgaactaacttggtgatttttgaagacaaaacatgctctttctaaagtaagagttctccgttttacttcagtgtataaagagtgtgagccaggagtacatctctccactactttcaaatcaaaaacatcattgaactttgcctttggaagcttggagaatattcaaataagtgattttgagagttcattggaggggagatggggagatgaggaaaagtggaagaaatgagaaaagattattttttaaaaaattaaaaaataatttggcagaaataatttctaagcactaagtatatatccaatacattttagttttatttttaaagatatgatgatggaattgctgtcctgcatggtgccacagccctttagtcccaaataaatacacagaggcttatattaattatcaattgtttagcctatggctcaggcttcctattggctagctctcttttaattgttaacacataactattaatctgtgtgccttcacattgccttctcttattggagattccttggtgtcctaacttcctggtggctacatggcttctccacctagactgcttgcactctgcctccctcttaccagcattctcctagtctggtaaccccaactatagttcctccatgactactggccaatcagcatttattcatcaacaaataagagaaacatgtattcaaagcatagagaagggcatactccattaaaggttagattaaggagttatattaagaaaacataagcaataatctcaccttccttttgtatacacagagccaataactgaaagtgaaatttttatttttgtgttttatcaaagcataccaaattcaatgtgtccatttcatgaggttcaaaaataaattcagttctccttcatatttaatacagatatatccctttttaagtgttataatgacttcaactcatggtgagtatttaatgagagctacagttggcaatgacatgccttggtgagaaagcagcaggtcagtctgccccatgaatttgcaatcagtttccaagacaacttagtcagtttcctttcaaccctgtcactcactccaagtatatacagtattgctcactgatacataatctgttatcaaaaaccatgaaaagggtttgctaaattttccactacacaaatgtcaccaggacacactggatgctacaaagtgatttcacaatgacctaagaataaaacaagtttccacagagcttagtttttatttgatcagaatttccaaaatctcacattttgttcagttctcctacgaagctgtagattactattctagaattttccaccctcattaagcaaactgttgcaatttgttttcttgaaaaacacttttgaaaatgcacattaatatataaactatatataaatgttatatgtaaattgtatatatatatgtatatatattatatatatacatatatatataataattttttccagtcacccagcgcttttttctgtttaatgcaactaagtttaaaaagtaacattgcttatgaatgtgtctgtatggagaaaacacacaaatctatttacaatgaaaagatctattcataacaaggtcttaaatattttataacctgggtattttctttcaatattttagtctccatttagccatgcctgggagttagtattcatctttatcacacagctctgtaatagctaaggttactgcttataactgaaatccctatcctgctaaacagagcttataaatgattgagaactattcttttttggaaaattttagtaaattaaaatataacaataaactatttatatctatgagatgtgtttttgaagcaattttaatgtaaacttactgcccgaaacagaagtcatttggagaattaaaatctttaataatactggcaagtatgtcagcattgctgccaacttgtgtgcagcatgatgatcagtatttgccataacaagaggatttaagaccagataattttcagtatgattcagcttattcgatggttgtttgacaatgttactattcagtattccttgtcctagttgcttgagaatattcaatagcaaatttgaaggagctgaacattgtatattatgggtaatttctttccaaacaaaatttccaaaaataatgtaatgcctgaatatattctcaataaaaagtaggcaaaataccctactttaactgaacagagtatatacggtagagaagaatcaagcttcgaaaaaagccacaaatcattcatgacaaagagagacagccactggaaattatcacaattaggaataaagcctgaggaaccttggaggattccatggcaggcaaggctgaggggcagggaacaacaggaagacagagcttaagtgagaagctttattagaaaaggaagataggtgagaggaaagagaaaagatataaagagaaacagacacagatgatagaagagaagagggggataggaaaagtcctgtctgccccaggagaacagcaggagagatagagggaaagtgagccagaaagagaacagaaaagaaagcagagagcatgagtttgtggaggtctttcttttaaaggggttctttgcacctcgactaaccagggtactgcctgagagcattatggcaggtgatgagggcaggcaagactaatgcctaaatccttacaaccacaccattggtaaggcaaagataccaggtatttttaaagacaatgtttcagggaagcaatcactattttaatgaattatacataatatgctttggatattcttaactggaagcagttaaaaagtgtcacaatttttaacttaagttttgtccatggtgacagatttttgattgttttttcaatttaaaatgttgatgaatatgtgctgtgttgtctttggagtggaactccaacatatacaaaaattagcttttttttcagatgacttctggacatggcctaaagataagctaatgcaatatgcttttattattatatgaaatttgtttgtcatgctataataaaaatccagagctgcagaatgtcagataattcctctctaaacaagctataccccaagggatatacaggacttcaatgatttttatgtaaaatttcacttatgcactttgaaatataaacaacaaagatagtaacacagctacccatggatagcaccatcttttgtagtcagacattctgtgtttatattaccattgttcctggctgaataacatgctactcacagtcacttacttatacttatccacactactgtttaaaagttaaaactgttacacacacactgttagatggtgagaactgcactgtcaagctgacagagaagagaagcacagaatcagagacctgtctcagtttttacacaagtgcagcagggatggccggcagctttagtctttacctacaatgtatttcgatgtattcccacacaatgagttttctcttctggtgagaatcagcataaaaagctattgaaagtctaaaaagtgaacccactagggttcatgaggaacatcctggtacacagccttcctccggaatttttttcaactattcagtggtttgaaaattagaagtccctttttttttcttatctgttgaatgcttgtacattcttttttatattaattagaaagaaaattattttacgtgtcaattccaggtccctttcccttcactcctcccctgccctgcccacaaacaccctacctatcccataccctttctgttcccaatccataggggtcttcaacgtctgtcttattctttgggatagggcctaggccaacccccttgtgtcccctttctttttcaacaaggaaagctttcttgttttgtttgactcaactttttaggagaagataaagtccttaagtaattgtaacctatagcctgcttgcacttcagagggaattgcaagaaaagcaagttacatgtctccacattttcatggagttgtgcctgaacaaaagggagctcatcaattactgagaggtttgtggtgacaatatcagggttatgattaggtaataaaaagccaactgagccgggcattggtggtgcatggctttaatcccagcagtcgggaggcagaggcaggcagatctctgtcagttcgaggccagcctggtctcaagagcaagtgccaggataggctccaatactacaaagagaaaccttgtctcgaaaaaccaaaaaaaaaaaaaaagaaagaaaagaaaaagaaaaaaccaactgaaatgaacatgtgtgaagaaacttagtaaaatcaaaataatgaactacgtactgccaaattcaggtaacataatgaggcaggatacaaagtggagcaatcataaccccacaccaaatcaaaagacataaggaacaatgggaaaaaggcaagatttagtgcagggtaggtgtctacctgatcacaacaccactgaaaacaatgagaagtgttttcaaggcagaatcaaaaaaatagaactgccaaaatgtttaaatgttcagaaaactatttttctattctagatatagaagagaatgaagataacagatgttaagaaaattcagcctcttactcatttagaaaagatttcattttattggcggagttaggatggagtctgcccagagctactcaccctgataacaacttaatcagctgcttccaaaaatagtgagcaaattctgtgagctgtgagctgtactaacggaatgtcaccagaatctttgatatattggtgatgatgatctagcaagaataataccttgtggaggaaaacattttaaggttgtaagtaaatgtttcaacctaatttcctaaaaccaattaactggttctttatttttctagtggttttgataatttattttttgcacataattttgtgtcaagaattatgagcacatcctctaactaaacccatatggcagtacttccagttgtatctgtattcccagaacttgaatactacagacactaacaaggtatttgtcaattatttctattttcctcgtgtattattgcagtgttgactaccaggccatggtataactctaaggtttagtgtgaattcttgtgttttcatagtatcctggcacaaacttctcttattacatttcactttgtaatcctacttcaaagtgacattttaaagccttataaagaatattgacactaaggaaatatccagagatctaaagtttgaccccaactaacaatctaaacaatagtagagaggctaccttaaaagcccttttcctataatgagattgatgactaccttatctgccatcctagagccttcatccagtagctgatggaaacagaagcagacccccacaactaaacactgagccaaactctggaatccagttgcagagagggaggagtgatgagcaaagggtcaagaccaggctggagaaacccaaaaaacagctgacctaaacaagagttggcttatggacaacaaactgatagccaggaaaccagcataggactgttccataccccctgaatgtggatgtcagtttggaggtctggttaatctattgggactctggtagtggataagtatttatccttagtacatgaatgaactttgggagcccaatcaacatagaccgatactctctcagcctagatacatgaggatgggtctaggccctgttccaaatgatatggcagactttgttggtccaccatggaaggcctcaccctccctggggagcagaaagggcatggatgggggggttcaatgggggacagaggaggaggggaaagagaaggaactgggattgacatgtaaaagaagcttctgatgtaaattttaagaaagaaaaagaaaggaaggaaagaaggaagagagagagaaaaaaggaagaaagagagaaagaaagaaagaaagaaagaaaggaaggaaggaagaaagaaagaaagaaagaaagaaagaaagaaagaaagggaagctttatccccaaaagacaaaactgagtactcagtttgcccataactagacttagcataatactcattgctgccttttgtgataggatgcatattttcctcttcttgcaggatacagaagtctgtcaatggcaggtttcattttaatcatcattacatttctagtgcttagtgtagtgtctgataaatagtaggtatgtgtgactataaatttaactataaatttatgcatttaataataccaattaatagtgattattcatagcttaattctggtgtttacaaactgcacaaagtttctataatgctacttctgttttacagatgagaaaaatgaactctagcaattactgaattaatcttgagaacagagacaatacatagtttgttaaagtcttcgatgttcttattaaaaatacaacacctagactcatatatttgaatgcttggtccaagttgctgaaactacttgggaaggattagtctgcatggccttgttggatgaagtatgttattggaggggggctcattttttcagaaacccctaccattctagcttgctctttctatccctcgtgcatatggatcagacctatgctatcagttactgttcaagggccgtgactggctgtctggtgacatgcttttggcatgatgttggactctactagtctctggaatgggaagactaaaattaaacactttcttttataagctaccctttctgtgatgtttgtcatagcagtagaaaagtgactaagacagaatctaatctctccttgatgtttggtcttctagaaagatatatctgaaaatcttacaactttactttttctcacttcattcttttctatttctgctttctttgctgtaacattttttattattatttcagtgcttcagcattgtgttcttttgtctcagttctaggattaacagtttggttcagaattcaaacatatacatctagagaatatactctcacaactgactagtatccagtagatgcattaggcaggactgtatcttttaggcagtcctgaacttagaagatggtattatttgatgcaagatgaaaaatatttttctttttgcaatatttgaaacaatttttcttactgtttatataactggatgtgtttccttctttcgttctttcatttatttcttctttatttcttttctcaagaccaggtttctctgtgtggtccctgtcaagcctgatactctctcagtagactaggctggccttgatctcgcagcaatccatctgcctctgcttcctaagtgctgggattaaaggcatttaccaccaccccctgacaactgtgtgttttctaatattcggtagctttattacttcattagtgttgctgtgataaaattctatgaccaaaagaagcctacaggggctagtgtttttctttgtgcactagaagaacaggatctatcatggtgtcgaagacaaagaaacaagttgggaaatgttgaccagagcctgactggtcacaatttcatccacacaaaggaaccagagggaagacaggacatggggcgaggttgcaaaactttaaagaccacctacctagtgatgtccttcctctaatatagctccagccctaaagggttcagaaccttcccaaacagtatcacaaatcagacagcaactgctcagatgcatgagcatatgggggcattttatattcaaccataaagctatctggctttgttcacttcatactcttcaataaaatgcgtctttattgtctaagacacatgtaatatcacagcaaagaaaaaattatatgtttggtggtatagtgcaccagatactaacatttaatttttagtttatttctcagttattttacacgaattactaattctatctaaaattcaatttatcctggttccatgattattctggaatattacaaccttattgctttttgtcacacccaaatctaaccagaaaaatctccaatatatatttgttttctttgtagagtctaaatgccatccttgtgacaccaaaatttcctggacataatctcagtaatagaaatatacattatatgtgtgacttgtactacagattaataacatagaaaaccacccaagtccaataaacttgtcaacaactaccatgcttctaaagaaagaaatacaggacacctgaaaatatgctttctttgcacatgagtctgagtcacttgttgtactgctgtctatggatgaccagtcagtaacgggttatgtgactccaaactaatatatatgtatgtatacatattattatatcccaagaggcaaaactaatgaaagtataatttgtcctgaataaacgcaaatgatgccaatagtgccacaccatcaaggtcagacaggtgttctacttatttctagtcaggacaagagctaaggagaagggagtactttagaagtcaaggagaattaagaaaataattcttcatttctttttagtacttctgaatttatttatgtattcggccttagtttttctttttcctatttcttgaatattttctcatagaactatatgactctgaactttctaaaaggcccagataagaggtctgtaacacaagttctaagaggtcataataataaaagcccagagtcagatatgtgggtaaaagatgatagataagagaaatgaaggaacaagcatagcaacactttaccttgacaacttcccagcagaaaggagagtaaattcttgcttcctccctcttatagtcctttctctgcccagccatcttacttactgtctccacccagccatctcacttcctgtctgttgtttagctccaccctctgatcatcatacatgttttatttataaaaacaagatatcaccacatatccccttttgtttaaaaataaaaaagttataaatgatataagaaaaactatatgcaataagtacaatatctacaggcaatattatatacaggcactaaggatcatcaatgtctatttcattagcatttaacaaattcagagaaaatactccattatttatcctatattgataagacgaaagtcttgtacctaatatagtttctattacaattcccattataaaattacattttaatgtctctcaacctattacacttaatacatcttttgtgggtttcttttttgagattggtaaacaatgaaaactataactacacgatctagactgaaactccctcagagacccaagaaggaattgatactgagtaaacaggatttaaaagcaagcaacttccaaaaaatgtgagagaaatgacaaaaacagctggctgcctggacagttacctaaggttgttctgctactttgggccatacatattcccttataggcctagaatctatgacagacttttctgtgaaggaggatattctgaaggacttcctgccttgtctaggcaaggtttgtagtcactctcttttttgtcttgtttgttcaatttggacagcatactttcagcaattgagaaaggcacactttcttgtccagtggctacttttgccagaaacaactgtagattccatgtggagcttctttgatgaacatcatcttctctgtagttccttctatgcccatcatcttgcctgaagtagattggtgctgccaggagaagacaatttaaatgtcttattctgtagctctctaaagtgtttgaagatgatctatctacaatatatctctgtttgaacttgcagacattacctagtataagtttgattgaaacaggtgagtcattattaatatacatttccttattatcttatatagttgttaataatacttttcaaggactagaaatttgcattacattattaatgagctgtgtaagtgcaataccttgaataatatttgaaatatatgcacactatgtcttaaattaatttcaaaatagtatcaatatacaatatttgtatacattatataaaaatctaatcctacataaaatatttaaaactagtagttgctttttagaagtagattcaatactttaccttcttatctcatcatatctatatacctccctttttcttttcacagaatattcaataatcaacctttttatcctatcatttatctatcacccaccccctctttttttcattaccaacaagttttaaacaatgccctaaacaatgacaaatatccataaccataaaccactcacctcacctcttgggaatgtgtcatgttcttaatgttacttcctgcttctgggggcaacagcatgtttagggaatcctaaaagaaaaaaatgtggttaattgcaaaactgtatcattttttccattctctgaataataggagagtgtagtacttgtctcatgtcctggctaaagtagtttgtggggctggctcatctcacctagccatctaaaaattgttctgatcagtgtctgtgaggctggatcatctcatatgacctcctcaaaattattctgagcagtatttagtacaaagtgtatcatttgttggagctgtccagcttaaaggtggtggcatagttctggtgaaattgctattctgggtccccaaaggtcatggcatggtcatggttaactgtcagaaaaaatggtaaagactcaaacacaaaatcatgtacaggaatttagaccaaatcttttctataattacttagttctctatatgaccattaatatcatgacaaaaagtttaaaatacatatatatatatatatatcaaaataaaatcaaaggattatgagattatcagcaatacaatagtccattactctttttcttctgttccatttaaggtggatcttctgacatgataaaaaaagatgtttgatttttcttttacaagcctactggggtttagagaaaaagagagccaaatttcacctccaaagccaggtttaatatttaattggaccaggattacaaaataaaacatttccattatgtctatagggaagagaagaaacaaacatttggaagatttaaaaattttatcctgttgtaaatatgatgtgccaataggcaaattttactcattttcttgggacaatttttctggatgatgttcttttcttcagatgtcttatttgtccagtactctctggattccttagctggatacatttattctcctgaaaagagaaaaattaaacccttccccaaccctacattttagggaggttctcctttggcttctccttatatctgatcaaatgagaagcatttgttggttttataggttagtttatattaaatggccatactgagtgaggaactatcatctcttccaattaagaggtgtcttggtaaaatcaattctttattgattttaatggttacctgtggaaacaaagaaaaacctcttttccaacaaaacacatgtcctagattccattctgaggtcaacacatttttgaagttcacccactaatttaatttcatattttttttatccaatgtctctccccagctgttgctttctcattagcattcagaaaattcaaagtgaataaagcactatttctggggttcgttatcatccattttagtttatcaaattcacttagagtttgatttgatctttttataactgcctgaaatgtagaattatttggtatacctgtactatgctttatattataataagcaagaaaacttttattttcatagacacatatggtggagcactgtccatttttatttgtgcaggtatacccattatggccataacttctagcaaatgtgcagttacttaattgttcttttctgtactcaaagaagatgcatattgaaaaactgtatgtgtattgattgtgtagtatacatatattaattttcctaattctacaaagtataacacatccatctgccagatttcatccctctgaataccctttgagttacattctgcaggtagcggagtttggttatataagaacaaataggaaatttccttgtaataaccttagcttgttgccaagtgatagaagaatcctttttaaaaatttgctattgacatggtgtttttaaatgaaatttggaagctttagcgtattttctatcgatagttgatcaatttgacattggattgtgctagaggggccagcagatctgtatggtatcagttctgcatcatctggtaaatattcagcagtttcaatatgcaaaacaactgtttctgcatatagggaatcagtaactagtttcagagtttctttatgatctattagcagcatgagaatagaatataattctgacttttggacagaattataaagactttgttccactttaaattttctgatttgtaacctcactttccttatttatttgcatcagtatagaatgtaggggctccagttatcggtgtttcccttacaatgtgaggacagatccaggtagttctttttcataagttgaattttcttgcttttgggaaaatcgttcatctctctcccaaaacaatattactgcaaactcttttccagggttcactttctacccatgatttgtcaatttcatcattcatgaaacatagtataatttctgttggatcattttggctatttgaaaaagtctccattttacttttagaatcaactgagagacacttttcaataagtttttaactttttagttgctttatgtggtaaaaatatccattctctgatagtatctttcttctgcattaaaattcctgtagcggaatgattagagggctttttgaggaaaaatcaattaagctttgcatcctcaaaagtccacaatgtacactctataatgttacaataaatctttctgccaaatgctgcctgagccccactaccaagtgtgagctttacaccagccacccgcctgagttagggcccaaatgaatacacagaaacttgtattaggtacagtgctgcttggccaatgactaggattctcatctgttatctcagtcttaactatcataaacctgtatattttataacacttatcttataggatgccttattgtcatccctccttgctggtagatcacattgtgctgctggagcaggagtggaggggaaaagagggacgcttcctgtttctcctttaaatatgagtctccttgctatgtcacttcctgcctggatcaccacttatctactatatttcccagaatcttagttgactccttgtcccatctaccttgctgtctcattggccaaacagtattttatttaacaattaataagataaacatatacagaagtacttcccccatcatctcctcttttatgtctaaaataaaaggataacttatcttttataataactgaagaaatctataaccataaatatctgtcttcaactctatcaaagaccacagaaggataatatatagtctctagaattgacagagacatctatctcgatacctggacagtcacccaaagttcctttgtaatgttggggcatccatcttcagcccacaggccatagtgtgtctgacacacttctctatttcaacaggaactcttcagtgctgtcttgttttgtaagttcagcagtcacttttttgggggttctgcatgtccagtttatacagcaacacacagtccaggcaagagcagtttcttgcccaaatggctaatcttgccatgttgaaagcaaactccataacgagtttcttcaatgcctatcatcctttctgacataattggtgtgccaggagcagttgtgtctcactgacaagaaaaaccctaaaccatttaaatgccatatttttgtaggtctttgaaaggtttgaagtatacctattcatctcaaatacatctttgtatatctagaaaacctaactaacctnnnnnnnnnnnnnnnnnnnnnnnnnnnnnnnnnnnnnnnnnnnnnnnnnnnnnnnnnnnnnnnnnnnnnnnnnnnnnnnnnnnnnnnnnnnnnnnnnnnnnnnnnnnnnnnnnnnnnnnnnnnnnnnnnnnnnnnnnnnnnnnnnnnnnnnnnnnnnnnnnnnnnnnnnnnnnnnnnnnnnnnnnnnnnnnnnnnnnnnnnnnnnnnnnnnnnnnnnnnnnnnnnnnnnnnnnnnnnnnnnnnnnnnnnnnnnnnnnnnnnnnnnnnnnnnnnnnnnnnnnnnnnnnnnnnnnnnnnnnnnnnnnnnnnnnnnnnnnnnnnnnnnnnnnnnnnnnnnnnnnnnnnnaaaatagaaacctgaccaagtccttgtttttgtagtctgtaaggctgtatcatctcagctttaggggatcttgcttgatcaaaccatattagtctggaaggaatccatagctttttattttctgtggaaatacaagtaaaacttttatttctaagtagcctgtccttagacttaaattttgaagttagggcatttttaaaatctataaattggattaatttagcagcatttataatcaaatgtattttagcagcattaatttttttcctcagcaatcaaacaatttaagacaacagtatggcatttagtatccagattctctgtgtatttttcatctctaggtggctttttttaccattctacttttactttcttttgtttatttttttgagatagggtttctctgtggaaatctgcctgcctctgcttccttcagcaaatcctactgacgttggccaccacaactggctactctatttccacctgttactttttctctcaaaagcctacatatatttttaaacccagtgtaaaccttcagagatttttctttatctggatctgtctttatcatcttgggagtgctgagtctaaactccagaagcctagggatggtgcaagcatatggaagctgctctgcgatgcctctcagcagcccgacagtgcaggctgtggtggcaggtttccctctttctctgggaaacttggggcatggggtcatcccactcactgacaacattctgttacgataaatctttctgccaaaagccacctgagccccccaccaccacttatctactacatttcccagaatcctctttgactcctaatcctgtataacttgccatctcattggccaaatagtattttatttaacaatcaataagataaacataaacagaagtacttcccccatgactgtaatttctcttccacaaaagccaattctctctcagcttcagctgttaattccataggactatttaagtccttgttaccatttaagtttttgttacaattaattagttgatcaggttttatcccaatagtgtgccttagattagaaatgtctcctagcaatctttgaaaatggttaagagtacataataaatctctcttattttgcacattttgcagtttaatttttgtaaacctatttcataacctaaataattaatagaatcttgtctttgtatttttcaggagcatttttaatcccccaagaggcataattttctttacttcttcaattctctaaattacctacacttgaatcagataaaggatgtcaccatgtaataataaacaatagattaaggaaagtacttacatattatttctaatggctgacatagaaaatgttggcacagtgtagggatatttttacattccctgtgtgagagtaccttccaatcatatctcttagcaggctgcgaattatttattatacatggtcactgtgaaggcaaattgttctgtgtgcctttgttgcagtggtatactaaagaaacactcttttaaatcaataaatataataggccatccttcaggcaatagagaaggaaaaggaatttcaaatttaaggagccagtttgttgtatcaccttataaacagctcttatatatgttaccattctctatttacctgttttctttttaataacaaatacaggagaattccaattgctggttgattcctctatatgttctatatttagttgctcatgtaccagctttcttttcttttttttccaagacaggatttctctgtgtagctttggagcctatcctggcactcactctggagactagactcaccatgaactcacagagatgctcctgcctctgcctcctgagtgctgggattaaaggtgtgtgccaccaatgcttggcacctataccagctttctaaagccttcagtttctctgttgttaaagactactgtgcaacccatacaggtttgtttttcagtgattttaatagtgggtctattggtatatttgaaagattagaagctgttgtgtcctattcttgtgcaaactgaatggttggttgtcattctttatataacctacttgtacatattccagagccatgtgttcatttatggtttgtttctaagtttggggtaatgttattctgagtattccattgctgtaacaaatcatatccccacaaattcattgcaatattaggaatatataggtttaatattctcttctgtccttctggctctatatattcaagccatcttgtgctctgttttacctaagataaagtttcaatccctaaaagttgaacatttacctcctaaagaggccaattttaatgccaatattctttctatataattgtcaaatctgcttccgtgtctatcaaaacttcaatgctaaaatcacctgctcatcctgttaatttcggtctctgatcatttatagaagttcaccaatatacttgctctgtgagtttttaaaatttttgttctttcttttatagatattttatcatcgcatgcagtatgattccctataatatatattatgcttttttattgctctgggaaggagtttccatggtgacaggaaagtgctgagtcaaacttggcacaggcatcagcaaaacaccctcagagagtttcacaatggccaagtaattccttgacaaaatcttgttgacttacattcttttctccaatgctcgcctttgtcgaaccttctgcataatccagaagggagagtattctgttttgtttatctttataaaaagcaatgtttctagaaacaccctgtttactaccccctttaaaatttgcaaaaatttaaaaaaattgacatttcaatttttctttaaaacttttgaaatcacctatctatatatcattatcatctttatgagtttcaatattaattatatcttggatctaatcctccaaaggtcttgaccttgactttaaatgcctaattatcttttggcattttcaaaagccattgattcaattattatttttctagattctgcatctgttattattctatttactgctaatgatcgtctttgttaggaatacatgaaggtttcctttgctccctatataacttctataaatgacttatttttatttcctacttccccaatgctgtcttaagcattcaaagatgatgcatggcatgaaaccaagaagtgacattgccttaataagtaacataatctcttctaagaaaatgatcttgggagatattcatacttgtctctttaaccctttgttcaatattcttagtctcttctctgactcaggaagtcccttgtaattgtggaccagactctagaacaactttaacaaatctatccagtctataaggataactctattacaatccaccatgtatttatcatcttcttcacaaatggtgactgtatgccatataaaactactgcatacttgaatttccctaaatctaataatgtgaaagactttcaagtagctctcatataagctactcaaatctcaaatcatcatttggtgattcctgtaaggttactggatatattgagattggttgtcttaagaccttatagtgttcatttttaacccgataatgccatgcagaatttgtttccacatttaattccccagcctgagttttaatatctctataatctgctacaatatattttactcaggcctgcatcttggcattcatgtcaaccatctattttatagataaaccaagaattatcaaattgatagttaacagtatgtcaatcttggttaaattgaccaccacttcatttaattgctccaggctataatgtttcccattttaacatggaaaaatctttttttaaactaattctttcctttaagtatttccaatagacttaacaaatattccaacattctcagtgaactttgaggtgtagcatctctgattctagaactagcaagtggatgtgagctgagagtggcagccagaggacaggggctgtagggaaggcccaaaatccatagtggtgttgggagaggtagagtgatagagaaagaaaataaagcaagatgtctgtctgaaaaacacacatgggattggtaagaagaaacaagtgtggtggttatttgtcagagggcaaagacaccagagtttgggttgcagctgaagtctgttcagaaaacctacacctgaatattctcacacttgctcaaaatttggggaaaatcaaaagaaaatctatcaggtcatgcagtgcttcagggatctcaggcctgggtcttggctggtgtctcaaagaagatttcttgtgaatttgtacctttatgtgggtgccaatctgtatgatgagtttaaataggtcttaataataaaagcctggcatcagatataggggtaaaacgattagcaagacgagtgagcaaaaccatagctgcacgttaccttggcaattttgcagctgaaaagagaatgaatatctgtttcctgttttctgtattcctttctctgcccagccatctcatttcctgtctgtctgttagctagagacaagctccaccctctgatcttcagaaatgctttatttgcaaacaagatgtcaccacagaggacagtactctaattgaactgaaccagtcctctaggctcaggtcaatataaatactgtgtatccatgtgtatgtatatatgtgtacatatatgtatggatctgtgtgtgtacatatttgtgtgagggtatgtgtgttgatgtgtgtgtgtgtgtgtgtgtgtgtgtgtgtgtgtgtactcgatatgtgtgtaaatggtgtgtgtgtgtgtgtgtgtgtgtgtgtgtgtgtgtactcgatatgtgtgtaaatggtatgtgtctgtgcatgtatgtgttttgtgtgtgtgtgtttctgtgtgttgtgtgagagtttaagtgtgtgtttgttgtctatagcatgtccttttttgcacagaaatgttgaggattttttttttttactgaaactttaattgacactcttcacaaagtattttcacaagaaaaatcattccagcaagcttgacctaaagtggaacatctgtaaaaaattaggtccttcctgagtacaaaaaaagtgatatgctggtttcacatgagttattttaatttatgaaaaccaagagcttcagatgtaggacaatgatgtaacagtttcctaaatatttttagggacatacatgcaatcacagcaagacacacgtacacacacacacacacacacacacacacacacacacacactccacacggctcaaagacatatgcatacatacatgtgacaagttccaggacagcctggaataaaaaagtgaattcctagttaacttgggtgacaaatagtaataccctatacttaaaaagttatagtaatgattattctatatcaaatgatctttgacctttctggggggagaggatagagtctcatggaatttatctcatacttttgtattcaagcaatcctcctgtctcagcttcccaagtacataacaaattattgcctacttgtacttggtgacacaaaacaaatattctattggctatacaaaagagcaaaatattatgagaaaagggatgagttggtgagcttcccacaacatgttcataataggacctgttgatacaagctggagcaaatcgaagaaaagaaccttgagagaaaaataaactagaagaaagaaaaaccccaaagcacatgtattatacttggatacactaatttactatgcaacacccttcttgtctcagtagattaaccatgtgagtgtgtgtatttcataaaagtttagtccctgtagtggtgagccattcctcttcactcttgaaaagaaatcatctggaacatagatgctcaaggaagcaacagatgtgatagagcgctggatagttcaaaagagcaaccagggctcaaaatgacttacctaatatttactatgtctgctcatgttccagtatatgcagcacaagatactttctatgcttagatgtggctatatgactgggaatgtattgcctatattcaaagaatggctatatgatgaacacctggttttgtctatgccaagacactcgagagaataaacactctttgcaatgaatttgacagatgatatgtgtttctttagagactatagtaaggagcagaaaatgccatctaaagaggagaaacattctttgtagcaacctcttctaattaaagggcgtaattactccatttatgagtctcatagtctacaggtaattagtgggcatgtttataaataatttaaaaaatatctaagatgttctcataatttctataggattcacacaaaatggtttcaaaaactgacataatgggtaaaccaggagcctgtctaaaactggcaatctcttgtagccatttttaagaaagaatgattcttacaacatacttataaaattacttctaaatcatcatcaggagttcagatgacaattcccaccagatctcaactattgtatatttatttcttttacaagaaattagaatgtctttcctcagaataatatttgtatcttactatgaaaggaaaaagaaaggtatgaaaacatatggggaacttatacaatcaactattccaactataaatttgtcagtaagaaatcatttctgcatacacatgattctacatttacttgcagtactaggagctgggttgtggggggacttagttgttgagcacctgccaatcatgcatgaggtcccagaatcaatccctagaaaaaccaaaatcaaccagtcagccaataatgatataaagtacatcgtaacaccacaatctttttatatattttatttcattttacatagcaaccctagttccctgtccccttcttctgcccctctcctgccctgttcccacccctgtccactcctcagggtgtttaagtcctcccatgggtagtcaacaatgcctggcacaacaagttgtggcatgagaaagacccccccccctgtatcaaggctgaacaagctatcccatcatagaaaatgggctccaaaaccagttcatgcacctggaatgggtcctgtccttactgccagctctctgcccaacagatcatgtcacataactgtaaccaacattcaaagggccaagttcagttccatgcaggtttcccagatttcagttcatagtccatgagctcccactaactcagctgtctttgtggttttccccatgatgctcttgaccccacttgttcatatgatccctcctccctctcttcaactgaactccaggagctcaacccagtgcttggctgtgagtcactgcatgtgtttccatcatttactggatgtaggttctatgatgacaattagggtagtcactaatctgattacagtggaaggccccattcaggcacccttacgaatattgctaggagtcttagctgggatcattcttgtggatttctgagtatttctatagctccaggtttctccctctatccagataacactttcattgttttcctccatggtgaaaaggttatcaatgtgaaaccacaatctttgatcaattgtcatgaaaatgtacgacttagcatgagaaagaggttaaagatagcaaaaaataagtgaatgaaatattgcattaaataatattatgttcagtaaacagtatcattcagagaccagtcagcccaatcaatagaattacatcaacatggatattgcaatctatcagcctgaataagaactgtgtctgacacagataattatttacttttagtgttcaatgaatggaaaccttgttcttctagaaagagtccagtattatctggagagataccagccttgtggagcttgcttacttcagcttcatgtagcatagatctgaagctgtgggaaagacaaggctttggaaatctggtttttgtaaacttctcaacatattgtcacaatcattaccatctctccttcagggtcctttataaaaatctgtcagtaaacctgtcaatagtcagattgtcttcttcttatgagcttgctcaagccattttcccaagcttccagctctgagttatgatatgtcaaaatgcacagataattggactgtcagtaaagtatagcaatattaagtaatactgacttttattttcattatggaccaatcacactaaaacactcagtgaaaaacccaaagcagataagatatcagaaaatcttgctcccaatagaagcactttaccttccttaattatttgaccatggtgttctggtccataacatttcatatatgataaggatagtgaccttgtgtttgtgaatgaagggacttggttatttgtaaatctgagaagtaaaagcctttagaatgtttgtttcccttaattcacattgcaggaaaaacatcttctgtgcctacaagtgccattgaattttcaacctccctttgataatgtatttcaaaggcctgatattttctaaccaggctttgaagaaagtctgccagcaacagcccaatagttgtttccagaaatcctttagctacatacactcatacaatcagatttcctattttgcaatgctcagttttgggaagcagctagttatttaactcatgaaaacatttgttataaaggagataacatcaagaggagatgcacttagagacctcatggggatctaataatctgtttccattgtatatgtcatcagttcagcaaatggtttgaattcatgcacacaatgagattggaataaaatacccaaattctcaaatttcagatgcaggatgaatgaaagaatgcaaaattgataagtgctaatgcttcaaaatatttaagtttatctttcccgattttttgccacaactgtaagaaccttcttccattccaggacctttctacagaacaaatccaagtaaattaatatactgatacattcttctctgatttgcacacacacacacacacacacacacacacacacacacacggacacaacacttcacagatccatgggaactttatatgagtgatttcttcaaaattagaaacaaagcgtggggatgtattgcttttctcataaaggtgcttgccttcaagactgagaacttgatctcaatacaaggtatcctaactgaatcctgaaaaattgttcctgatgtccacatatgcaccatagcgtgtcttcataaatacacacaaatgtacatgcacacacacacacacacacacacacacacacaatttaaaaataaagacagacgaaaagggaattattttttaaaataataaggattaacaagtttctacatttgcatcttacattggtaataagcagtactatctgaccagccattgagggatgaggcctagtttcatgaacaattttttttgtcttgttcagttacccaaagtgattcacactttcctgtgatacagaataaaattttccagctacacacaatgtcacagttacaatgcaaagtgctgtcttcaagaggatgacggggaaaggaaagataacctttgatagtgtctgattctatctgaacatctttatcaagaagtaagtcagtttgaaaagtaccagctctagttagtgatatcttccttctgttacttatcactgtgggaagttctggaaatgagtgaaactaatggaagattgagtgacacatcagttattccttatatagactacacacagctccctccaattttgctggagatctggaaaacagaatgctgcctatttggtagctaaaaatattaatccacttaaaatgaatgagcaaaatgtcaatgattcctcatccatggtttaacatgtgtttcaaaccagtttgaaatataggttaaaaaaaaggaaaacacagatagattagggggcattaatgtgcaacttgtaagaagcaaataacaggacatgcacacacacagttaatttactatagaattagaaatagttttagagataaagtttctacactaggctgaccttgatctcactgtggatgatattgaagtcctgatcatcttacatgaccacttaagacctgtaattaaataaatctacaacaaaattaagcttatttgatacagagaacagaacacatgctagaaaacactcgatcaaacaagatgcatggctgtcctgaaataaatgtcttcattttttatttctattacatattcaattctccacataaagaaacacatatgtgtattctttttatatatgaaatgcactacatatagttgtgactttctgcacgtggtgtcttttttattctgtattatgttaacctgagttatgtgactttgctgagtagcttctatagtttcatcctctcatttcatattgtcacacataacccttttctgccaaatactgacagtcatgccatcagaagataattataagttagaaagtgatatcatttctgtttccagaggcatggttgtactaagcacaactaaaaaagtgctcaccaggacattattgtgttctcttctggaatggtacttaggtacttaacattcattaaaaagatagttaaatttgttgaggagagattggttagtctcatggcaactaatgggaggactctgatataacatatcgtcctgaactcttcttaacagtgagattttatactctgttttcatgtctggtcccccttgagctctttttgtcttctcacttcctgcatcctgtggtgtgggaaagggaattgtatgataacaagctgtgatataacaaatggtggtggagaaaagagaatttctgggaaatccagaagggcagttttcctttatagataagttgtacctgctttcctgtgattttatttgttcattaattgccttgttaggttattgaaaagcatagtacttttgcttttaatgaacaattcccagggctacattataaaatatgagtaataaactgtcttccaatcacaaagaggtttggcctattgagcaaatattactgtggtaaatattacaatagatttatgaatgacagataatgaggacatgtgccatagcagagaatttgtcttatgggctgagacagataattcaaagataccattcaaatgtaattgggattcaggacatttcacacagcataaaatgaggtgttgctgtgtatatacttcctaagtcgacaaatacatacaatcaaacctcagacaggcagtgacagcaaacttctttaatcccagtacttgggcaacagaggcaggcggatttctgagtttgaagtcagcctagtctacagagtaagttccaggacatctagggctacacagagaaatcctgtttcataaacgaaacaaataaaatcccaagtccttttctacataaacatataaacattttcatagaaactaacatttcatcagaaattgagaacaacactaattttttccacagctgtacttaggacagttatttttttctaacataatattttattgagtatttggggaatctcacatgtacacacccatcacattgcttcccagtccacctccctgcacttgtgaccaatcccccaatcaaaaataagtccaatttgggttatttacatactaattggagcatggtcaaatgtgtgtcttcagtcattcttattactgccaaagtggcttatttgctctttagtctgtgggaccatgaatcatggactttcacatggtttctggggctcctggttgaagtagggacacaggcccacacctggccctcagatacagcagtgactagcacataaatatgtcttcaggtgaaagaatagaccaccaacatccacctgatattatgtcagcattggccactacatcagcccagaccctgctgcaataagaccataggcccagacagaaccttcagtggcatcaccaacctagatgtcaccacagcccttggtggcagcacagctgagaaacatcaacatagcttcaggctgattcacagaccacagggaacctcaggcctctctcatgcccatcactgctatcatgtcaccagctgcatatctttccacagtgtactcactgctctgcctctctatcacttccatttccccatcatctgttccttcatagtccttccccacactggtgggggcatttcttaggagagttttattttttgcatgtggagtggacagaatgagaaccaaacagacacctgctttgcacagttggagttaaaatgaatggcactccaggtgattttgactttacctcaaaaagcattgtcactcaagaggtgttttcagatgagtcactaaaattaattccagctggaagggcactgtgggtttgtctgggtgatggtctttaacagttggccaatatcaagaacttaaggcattgatgtggatccatggcagagcccttgcctcctattttcaaagactcgtgttcatttcccagcatctcagtatggctattatcagcaatagtagcatttagaccatacctggctcttcctccacatattaagtgaattaagaaaattgcaaactctagtacaatcatgagcaggtgatgaaaatttagagaagattaaattatataaagatggcacaagtcacttagtgttcaaagaaaaattatacttttaacatatttataaaaattactgtctgtccctcaagctaaaatttaccttggattttatataaaaagataggtttcaattattgctaaaggcacatatattttcctataatactctacagaagaatggaaaaaatacacattatttgaatagattatctatgagtcctaagagtagtactgaatattgaaagaaacaggaaatgcaaatgagaaaattaaatcatccttttggagagaagatgtgattggagtgatcctgtgttggaaagggaataaaaccagaattacatgagaccagagggagcatgtgtgagtcacacaaccagaattaagatgagacctgagaggaaggcatgggtaaggacacacaatcagaattaagatgagagatatacatcaacacctggaaaaggggaaagagacaagatctcctgagcaaattgggagcattgggggatggggaggaaggtaggaggaaagagaggggtggaggagatcttgaggtatcaggaagataagggaatacagaaaaagagcaagaaaagagatgcctcaatagagggagccattgtaggtttaaagagaaatctggcactagggaaatgtcaagagattcacaaggatgaactgaattaataatcttagcaatagttataagattgataactaccttacatgccatcctagagacttcacccagtagctgatagaagcaaaaacagagattctcagctaagcagtgagccaaactcctggaattcagttgtagagaaagagaagtgattgagcaaagggatcaaaaccatgctgggaaatcccacattagcaacagaccttgttgggaaccaaatctcagggttgggcatgagatcctaggccatgcttggcaggccacatagttaacctttacatagcagctccttagaacatcatctccagaaaagaaacaacttaacccagtcctccacccacaggctcagtcacctaagcaaccattccttaatcatgaactctttatcctgccaaacatcctctttttgacttcctaatatcctgcctataccaacacctggtgtgcaaagaacccattctgcccatccccatatcctgactatataagctagcctgagaaaagtaaagtttgccacttgatcagaatcctgtcttgtggtcgttatttctgcgtctcttgtcctcattccctatccctgaatctcttgccccaggttgatgtcctgcaggtcgggacaaaacctgactaagtgtgaattcacagatgcaagtctgacagctgggtgaccagcataagaccaaatcatgcccgctgaaagtgggtgtcacttgggagatgagggagtgtatgggacctctggcagtagaatcagtatttatccctagttcctggacactggcatcccattccctatagagggttactctctcagcctaaatacgtggcagagtgccacaaatgatgtgatagattttatgatcccctatgggaggcttcactctctttgaggaatggatggtggtgtgggatggggagttgtgggggccatgcaaggacagaagggagagggaagttggattggtatgtaaaatagtattgtgcttaatttaaataaaaaatcttaaaagagaagcaaaaaagaaaagaaaagtaaacaacaacaaatgatgatactagagggggaatcatgggtaaggacatacaatcagaatttgaacttttctggtttctatccactgactagtgacttggataaaattatgctttggaatcagttttgttgttgattgtttttacagaaatcttaatgtcattggtttctaaatgggataaaaagaggacttgaaatatttatgatagtgggaattttgatgatttgattaaattaaaataaaaagtcacacgtattctaattgtgtcacaaagattctaatcatgacatgagtccagttagcactaatgacaagcacacatttgaaaacttgtcaggagataataatgtttgtcttgaagaaaatttacacataaagaaagcagaaactgtgtcaacaagaagctattgcctgagggggttaggaaaagctcctcaaaagttactatttgaccatttactttaggcactcatatgagtctaaagagagatgatcaaatttgcagatttcagttagtgcctcacagttggacagacaataagatattaaaccacacaaagacaatttcatagagaatcttatgaaaacactacagtgtttctcatttcttttaatggtgggtaaaatgggttcattaccatagcttttttcctgtattatctaattatgccagcataaagaaggcaagcttcaatacaacaataatgtctctaaaagaaaaggatgagaatacagcaatactgaaacacatattatgtatatttctgagattatataattagggtgttttatgttaaaataacagatgcaatgacattttcattgttatctgatgagtgtagatctatagatttaattgattcaaaagctcatctagggtaggtttctcaataaagaaaattctttaaaaagaatgggctctagtaagagtgacacaaacagaaacaaagtgtctgaagggaaactggttcttgaaaggatgatagaaattgattgttagagtggaattttacaaagatttgcacttttcaatgtgaaagagacatgggaatatgcattcaattctatgtttctagtaagataggagtaaaatgatggcaaagactagcaccaatacttcatagattcttccaagagagagaactccccctaacattctctgtgggtactattgagactgtagttgccttgtatccaaaaggagaaaaatggaataaatctacaaaactaaatgtattttgaatatcaatacatgcaaatagtatcaggaggatactcatgaacatgagagttttatcctagaaatatcctatttgtttaccatatagaagtgagtatgtcacaaaatgcacagtcttaaatagaggtatctcagcagcccttactataaatacataacagcttgtttaagtgagaaatatatccacctgtcatcaaggctgcttatgtctgtcttgttctttttgtctaatctaaagtaacaacacaattggattaatatacgtttgtggagtgtgagagtctacaagagggaaaaatgccaaagtataccattccataaaacttcacttaagactcacataattttcacttaatacctaattccccttacagttaaagtaccaagattcctggtaatgggtttcttggattactggcagtgtgtagctctacagtgtagtttgtgctttatttacttttcttgaatatggctggtggctgtttctaaccatggatcccaagccttagctcctccttgctctccattacttacagggtctccactttcatctagtcaggaaaacacaggtatcttaacatgcgcttttctccatgctataacaagtacatgtctagtactgtcctctgaaatgatccagttcacaggaaaaatcagtcactataagaaattagaaaatgccctttgcattttctgtgcctaaaataatagcaatcacactatttatttattcgtttgtttgttctctcatgtatgtatgtgtgtgagtgtgtgtgtgagagtgagtgtgtgtgtgtgtgtgtgtgtgtgtgtgtgtgtgtgtgtgtgtatgtgtgatgttgtgaatttggaagtcagagatcaactttaagggttagttgtttctttttaccttgcatgtttcacgtatcatatccaggtcatctttctaggcagcaggtgcctttattagttgaaccatctcatcagtatgagttttgttttatcattgactcttaccaccttactcactcaagattacaatgtgctattcctgtacatggatatattgtttcttccaagtcagtaagaaaagctttttctaaacatgctatatcattttttcttatatttttcttaaaaaggtcagtttatctgaataattctcctacacccataaatacatctactctcatagttagcatgttattatcttttctgtaatgtttaattcactcagactttctccacacataagactgtgacatatttagtgttacagaaatatgcaagaagtggatgctgtactatttcatttttattgcagctgtgttagttattgaaataactaactgtattgcatgttgatggaagatatacaagttacttaagattgagacactgtcaaaattcaatataaatctatctttgttttgacagtgaggtaaattttccatagggcattcattcaaaaagttattattcaaaaattaaacttttaatggttttcaaaaccatgaaagaaacaatatcgattgccatgcaaaagaagagtcttgactgaagactgcagagtttcttctctctcttacaaaaagatgacttttacttctgccaaatgtgcaggttgccaagtgaagtacttctcaaacatgcatcaagaagtcctcctaatttccttcctttatggtgaggttcaaatgaacaagaatattaaatgtgagcattattattgactaaaagttatgacatgacttaataatttatacatatattgttttgtttagaacttgtctaagacaagaaaaatgtggttaaaggagataaccatagaaataaatacataaataaacataaagcagagaccagatgaaatgacaagaatagggcatagtgttctttttattgtacttctttagttcattcatttctttacttctatttgtaatttcagtgtctgattgtctgagagagagagagagagagagagagagagagagagaaggcttatgagtacatttctgtgcatacatatgggtatcagagatggacactgagtgctttctgagttcaatatccatcttccacttggagataggctaagtctcatttgaatacagaactcacattagcagtctagttagccagtttgcatgagtgatccctgtttcttgctctcaaggataaaatagagatgcagttgtgttaggagccgttacaagctggtgcgatttcgcactaggtaactttgtaacattccatcccttggtctccgcccctcctgtgacgtcatatgatccgatcagctgacgtcatatggtccgacgagcttcagccagtcagagagtaacagtctgaggcggcggttgccagcctatataagggaggggtttttgggtgttcggagtctccgctctgtaagctgatgctctctctctcaagatgcattaaagctttactgcagaaggatcctgattgtgtccccgcatcgtttttgctggcaaggcagttagcgcgggacacagttggggctgcatacccacccatcatttaaacagtgctggcttcatgtgctacatataatttataaaccccttccttctcagctattttttacctgatagtgaaaattagtaatcagttctgttagatcccactgtttctaatgatacaccaggtgatgaagttttgggttaaggatgtcaaggcatcttccccatgaaagaagatattgccttcaatccagaaagtgagcagaatgtaaaatcactcatgattgcttttcttctattcattctgcctcagtagtccatcatgttgcagtgagactatcctaccacccaaggactcctttcacatttataatggtaaatgaggtatagggtaaggattttctacaatgtgcacaaaaattagtttattatgtgttgcacaaaaaatgtttgggctcattaactcacaaggaaatggcctgttttcatttattttacaatctctgtttcatttcttcagtgcagttcctctgtccactccaaatccaaaatgaggaaaggtagattatttccattgacaaaacatattacattctgaattactacagattgcactagataatattccaagtcttaatgtgggaaagtagattaaaactattcattttcagattattttagctgtatctgtgcagttaatttattaataaagcaagataaataattagataatctctttgtcattgatttctaaatgggctttaaaatttccaataacttttattttaataattataggggaaacctagctatattactttcaatttcaaataatcatatgtgagactgcagagctgcagcctattaaaaactaagtgttactgagagaaaagaatgttgaaaacttgagctagagaaatagttcagcattttagggcatgtactttcctggaaagggacacttgttctcttcctagaacttcttccaggcagctcacaaccatctccaattccagctccaggggtccaactcccatttacagactctgcaggcactgcaccacacacacacacacacacacacacacacacacacacacacacacacacacacacaggacgagagtactcctaaagggcaacagtgccactttcatctcaggataaacaatttcatcaatttggagaaattcatgccaagcactataaacttagccaattatctgtgcctagttaggtctggcaatctagagaagaatgtactactgccattttctaaggctgtataatctttaagtacattaaaattacttatccttatgttgaaaggtaactagaagttgctcattgtcaaaattgcttccgtttttgtagcagacagagatcagtacagaaaaccataactagtcaaaatgcagagatctattgatgtgatggcgtaatgcttgtcacaaataagtatattaacaatacaaaccctacatttaaggcttagataacattgttgatcagtaactacaggcataatgcagctcatccaaatgcaaagaatattcatgtggttcttgtcgccttctcatgattcatttacaacacaatccctgcaacacttgaagctaagaatttcatagattagtaattgggaagtttataagagtcagagatacatgatgtgaagtttgatggtatttgcttccttgaaatgtctgagaagctctgaattataatcaagatgactgcctaaagaaaatctgaacagcaatgaaaccaacagacatgttaacatgtggtctcagccttacacaaagaactacaggtaaccaaggaatgttgagagtgggaacaatgatcttccccaacttggtgatctttctgggaacttttgtacatatactggattaatgtcatgatatgtgtgatttattgtagatttgtaaggatagttgaatgtaaggaagtttatttatataaatcattatctctataggaacttccctcacactgcttaaaggagttacctaaaatttaatagttaattctgcataactctcaagtacaaaatcaagacaaggttaaaatccacaattgtcaaaagccttagcaaaatagaaagtcaggaatggttgaaaccattttcttaagatgaccagggatatgagtgtataaataaaatatgtaatcttgtatattaataaaatttcatgcctttaattaaaccttgaagctatcattggtgtaatcatcgctactgctaggactaggaattgaacctaagcctacatgcatgttaggaagcatcatattagtgaatatcagccccatccatatataatttagtagtttactagctgaggcagtttaactgtacataaatttgccattgcttctcagtagagaaatcaataattacttggtaaaacccactgataaaggagtgatatttagctttggagcaatgtggtaggagcgttgaccaaggcatatgtgtggtataaatttcataacaaatgaaaatagcaagttacagaagaatttggatatttttgtttctgtggagaagttaagtataaattcaaattcaacacaacagacatgcaaacatgtacagactcatcctattttaaatcatccaaaatcaaatgggatctagacaaagtttcattatacagcatgactaaatttaggtttattcttcatggacattcataacatataccttattttttaagaaaaggaaaaaatagtcaaaacattaacacaacatttccttaaaaaatgcatttctacatgttcattgtggtttaatgatccagaataaggatgtctaagcaggaggaaacgtaccagccaatgctaaaagcaagattttctcctaaagcaattgttactatagtcagacaaatgtactggcctgtcctaggggttctgacaggatgtgccctcagcagcagcccctaagagcccaacctgtgtgtatattcactgtgttctctttttaaaagaaccctgcctacccccaatttttgtctttctctctgcttctctgtgtgtctcactctgcctctctcttctcttctgccactcctgtccccagaggcagatctcccctctctggttttccattcactttcccctaataaaaaaaccctcaacccaagctcttacaactggaaattttttcttgcatggtgctttttaaaattacaatagcaatcatgttttttgaataatcaggattttaattgaaagtgtcaccaaagagcctcggggtttatccaaagcacattttccttccagtctgattctttgtaacttggtcagtataatttgtcaactttttcaatatgttctaaatgaccatcaggtgctgggcaattgccattggaaggagacagcagtccaccctttccttcatttttgttgatttttttatttgaattcgaaacaagattgttttacatgaaaatcccagttcccttctccctccgcaactaaaaccctaccaatcacatatactttctgctttgcctggatggtgaggccttccatagggtgtcatcagagtctattgtatcctttggtatagggcctatgcccactcccgtgtcttggctcagggaatattcctctatgtggaatgggcacccaaagtccatacctgtgatagggataagtactggacaactacaggaggccccatagatttccaagacctcactgacacccacattcatggggtctggatcactcccatgctggtatcccaggtatcagtctggggagcaagagttccctgatgttcaggtcagctgcttgtgtgggtttcaccagcctggtgtggactcctttgctcttcactcatccttttctgcatctggatttcggttcagttcagtgattagttgtggtgtctgcttctacttctaccagctgctggatgagggctatcgggtggcatatgtcagtgatcaatctcattatcagtggagggcatttaaggtagcctctcctctgttgattagattgttagttggtgtcatctttgtagatctccagcaaacactttcttatgaatcagcctggtgaagccaaacataccttggagcacaaatcaaaatgattatggacacaaattcatgattgcaaccaatattcttttatgcaaaaaattactcataaacagacaatgtaggaagttaatatgctccagtgtgatatattattttctagctaaaagtatttcatgcttttaagagaatggtagtatttgagaattttctagaaatttacacatcaaaaatgatgatcaactagatatatccagctatgtcgtggttacggtaaaatgaacaaagaaataaataataaatatataaattttaaaaaggaatgaatttttaaatcactctcttgacctagagattttttaaatcccaaaatctgcctcctgggaaagtgaaaacagtagcgagaatcaatgagaggttggaggagccaaagtcaatgcagaaataatttgttgttttcaaagcccaagataccaattatcatcaaggtgagaacttttcccacttactgaaaattatttgaacctaggttctctattgggtgtcactgaaatgcatattagttggctcaaaaaacagaggcaattgaaggaagaaaaggcaccttaattataaagccttttactctgggatctgggaaaatcagaactaccaacttcccacttggctgcactgtaatagaagtctcatttttcttatttgtctccattttgatgagtttaaaataaatagtgttggggtatttttgtcacacctgttacaacttcattatgagagaaaataagtcatatgaaaatacattaaaatagagatagagttgaatatctcttagtaatacacaaatcaatatggactattttgcttagaagtacattttattgtgagcaatcaaaggagttcctaaaaaatcacttttctttgggcataggattctacagttttaagaacttctaaggtgagcagggattgcagttgctggacttgggacccaactgcagggatcaaggcaagatctctttgatttattgttctgtgctctcagtcacgtagttctttgtccagcctaggatctcataggtacctccatgattcagctacactgtcatggcaacagtctaggcctctctgtctctacctcagcagcaatggcattataggaatgtgctgctgctctccacccagatgtttacatggatgtcatagcatgatgcttctgcaggaagcactttattaatagccaccttgttagtgctttttcttgttttctaagataacactatgaaaacataattataaaatattattttttcaccttttgtttttgttgttgttgtttactttggtgtttggcattagagctgcattaagccaaggttatcctcaaaatctctacacactcaagaataatcttgaacttttgatcttcctgtctctcctctccctcctgaatcctgtgaagacaggtaagtgccaccaactggctgtcttctgagattaaaccttggatttactgcatggtagatgagcactctatcaaagaacctacacccacattcctaggtatcaggatgttttttagacagggtctcattatgtatttctgatatgcctgtacttctatatagatcagccaggcctattaactctttgttaatatcttgagagtttgttgtctgttataaaccagctatattctcttgaagaaatctagtcatttgatgtgggaaattaccaatatggtgccaggtaaaaatacaaggggatttaatagggaaaagccttacatacagagccacctcaccagccagcatggcagcagtctgtacaacaagctgaaaatgaaagcaaaagcatccgaccacataagtgtccctcactgtacatcaccctgaccaagtcctcgaaggcatggtcaggcacacctgtagccaggccctaagcaggtgtggctacagcatcccctacaatcattagtctagatcatgttgtgacctaatttccgtgttccgtctatagaaatgcatgttccatgattttataatgtattgaaatacttctaactcactaactcactatcatgagtgactgtccagcaagccaagcatctaccattatagagagttcatctgtgccctctctttgcaaaagattacccaagttgagcatgctgagagtgtgcactcttagagctgaaaaatgccagccatcacctgagtacccagatattctgtacgacctgccctatgcacaaggcctggagtatacagagaactagagagtagagcctgggctcctatgtggctcccagatgcttgatgaggcttttgggagcagtctttggaaggaggagttcccacacaactataaatagcccctcgcttaggttctgaaaagaagcataataaataattagttgccagggttaaagttagtgaaaatgtgcctcagtttgtccttgggacctctgaaagagagatagacattgctttatgtctttcctatggaagtattttaacagcatttgacaatatgcttgaatttgtgattattctaaggcatttccactttgtatgtgtcctacataaaagcatatttgctatagaatgctgttgtattttttaagtttaatgtcatctattctgtctgcccattatatatttaacttaggaaaattcttcttctggaaaaatgcaatttttcatgttattgttctttttggagcattaattaacccttaggtatccatttataatagagtataattcattacatcgtcaacatagatgttacatacttgtatctcaatctattgctttcataaatctcctttattaactttcagctttactgacttttgtctctgatagtaatcatgttatataatttagagcagtgtaatttagttatgttaaattgtataaaattgttataatctaatattacacatttcacacactatattattagtagttcataaggatttatatcagcatcttttactgatttcagatttttcacatttgtaattttcaaaatcattgtcagaattttctaaattccatgagaatttttaattaatatatcattaagaaaacttgcaaatgtgaattgtttaagccatattttgaggtatgattattctgtagcattctaattagatgacattctctgttgtgtcccggtgaaagaccgccgaagggagaccctcactcaaatctcgggaatagcaagcacccagtgaggcaccgagaccggacttgctgcaatcacacgaggaagtttattgaaaaaggaatggaatgagatctcaggccagcatgctggggtagagactcatacaccacgcaggggtggaggagttcgaccctgacccaaacttgtgacaagcttataaaggcaaaaactataaaggagggggaggactagggacggaataggggaagcccaaagttacacatttactcataaaggcaaaaatcacaaaggagggggaggactagggaggaaataggggaagcccaaagttacacatttactcataaaggcaaaaatcacaaaggagggggaggactagggaggaaataggggaagcccaaagttacacatttactcataaaggcaaaaatcacaaaggagggggaggactagggaggaaataggggaagcccaaagttacacatttactcatcagttaaactatgtggacacacctggggcatttgaacttttcacagaggtcgttgggacatcctgtggttactccaggaactgtttttttctcatgagagttccgggagcggccacctgcaggggatgggaaccccaaggtgatgagcccatattcttatagacagctagtactttttttactcttcattccccacttcttcttgtaaatagctctaatcttagagcgatccctcagtttcttgtagtatctggtacttctgtcttaagaccattacctggacagcatttattctttcttttataaatgccaccagcctattgagaatacatggcccaaaggttaggatcagtatcaaaatgattaaaggcccggccaaggtggagaccagagtagagaaccaaggtgaccgattaaaccaattttcataccatccttggtatgcttctctttctttttttctgttttctagcctttctctaagctttgccatgaagtccctgatgacacccaaatgatctacatagaagcaacattcttactttaaggcagcacagagccctccctctttaagaaaacacaggtctaatctccttctgttttgcagcactacctctgacagtgaagttaatgactgttctagtttagttatggactgctccaatgctcccaggtctgcatccatagcagctctaagctcattatagtagtagggttgttggatgagggcggctgctccagttccaacccctgctgctactcctagtcctaacaagacagctaaggtcagggtaacaggttccctcttgtaacgagtacagtcatcaaattcatctataaatgaactatcatcatgataaatgaccctaggcaccgatgaccctaggcaccagctggaccaaaatacaaaagtccctagtactgttaaaaagggacatatgcaagcagggggtcaggccagtgccacaagcccaccaagtatgtgtgggggtgtactagatattgattttggccatctgtcagggtgtcaatagttacgttacagaggggctggtgtctggtaggcactttgcctatgcatagtccagtgtcataccgctgaaagggtcagcttccgttggctcccccaggggcaatgtgaatggtcataagtaacattataactccacacttgagctattccttcataataagggggattagaagcaaagcacacccagcaagattgggtagcagtgcggtttaaaacaacaaacgcactatcgagcagattgaacaggcgatcctcagttctcataggggggagggaggatgtgattggattagggctggaagaggcctttggtgatggggtgagactaggaagtctctcaggcctgggtaggagattattaagcgccggattggggcctacgggtcgttcgggcagactctctatcttcatcctgatagcgaaaaggaacccagggtctcccgttccagtatagactctccaaccccagctgttgccttttactcattggcgatcttgttttccccatgctgtgaagctaatataaagagggttgcaatagctgcctttgcatggcccctgtgggccacccgaggccacaggagcacatccagtcttataagctaggtatttagatgtgtctctctctctcctttttctggctcttcaggattaggacccttattttactataatcagatcccaggaggaggaaggattccagtaggcttctcctgtggtctcacatccccatnnnnnnnnnnnnnnnnnnnnnnnnnnnnnnnnnnnnnnnnnnnnnnnnnnnnnnnnnnnnnnnnnnnnnnnnnnnnnnnnnnnnnnnnnnngtagaagtctgctgcctggaggttggctcggaaaaattgtccagaacatcccaatgtgctccctataccatgagggacacattgttcctccgtgggtgctttatctaaattgtcataattagaaagatcccaggccagggaaccggcagctaacttacagatatcaggtgcaagatcagatacaaatctgccctattctacatggatcaccaaattatccactagtggtgcacattacaactttgagtttccactacataggaacatgagggttattccccaaggttggggctacggcgaaggcgcaacttaagaggattatcactggtggccactgtccaattattttcacggttgttttcattttgactgggtgccttttttatgtgggaagcgtggatccaggcagcaatcccttttacctttactgccatgggcatagtcaacagcacgagatagggtcctttccaccgaggctcaagcttgccagcacgatgtcgtctgaccaagactgagtctccgacctggaatccgtggggcactgtggtagtccctggagtgtaggcttctttgatctgattccaaatctgtgttttgacaacttctaaggcctttaagtgggtaaacagagcagaggaggagggagagttagtgcaaggatccaatatcctgcctgactcagtcaagggggacggtcccccatgtagcattttgtaagggtaaggccgaaacatccacgtgtttttcggaccctaaggagcgcaaaggggaggagggtcacccagtctttgccactggtctcaatagccaatttagtaagcgtctcttttagggttctacacattctttctacctgtcctgagctctggggtctgtaagcacaatgtaatttccaattagtccccagttgggtggccaactcctgtcttacctgggcaacaaaagctggcccgttgtctgaaccaattaccatggggatcctgaaccggtgcaggatttcttccagtatcttcttggttaccatttgagcagtttcagacttggtgggaaaggcttccacccatcctgaaaaagtgtctataaaaactagaaggtacttattaccatattttcctggcttaatttcagtgaagtctacctcccaataaattcctggccgatctcccctcattctttttccacgttctttgaacgatggggcagcattggtcaaggtgcaggcttgacatgactctactacctcttttattattgtgtttaatcttagaatacaatatttagaacctttgattaattgcttaagtttttcaattccaagatgagtcagctggtgtattcgtctcacatagttttgtccttctttagagggcagaatgattcgtccatctttggtttttgccaatcaaccgaaactgaacatccgagcttttcctgcacaggtcatatcttcgattaaaccataatctttatagggatagatgaagctgggatccatggcttgcgggggttctggcggggttccagtttcctccgccagcactaccgctccctgggcagcttgctttgctgttagatcagccatctggttcccctttgtgactcggtcagtccccttctggtgtcccaggcagtggacgatggctaatttttgtggaagatgtatggcttctaggagggccaggatttcttctgcttgagaagagcctagagtaaggacttttgaaggtgagtaggcccctctgtctgtagatggccccatgaatgtgagccatggcgaaagcataatggctgtcggtgtaaatgttgatagccttaacttctgccagacacagagcttgaatcaatgccaggagctcagctttttgagccgaggttccttatgggagactgctagcccaaattacctgctttccatccaccactgttgctcccacccttcttttaccttctaccacaaaactgctgcggtccgtgtaccagttaggcacacccggccaaggttggtcggtcaggtctttcctggtcccggtttcttcagccaggacatcaatgcatcggtgcactggggtagagtcctctgcttcagggagcagggtggccggcttgagaagagcaggaggagtgaaggttatccgatcatataacaacaagctctggtaatgtgtcatccgggtatttgtcatccagcagtcggggggctgctgcacaatattttctacccgctggtgacagggtctagctttttagataggtaggccaccagccacttccagggccccagggtctgagtcagaactccacgggccactccagccnnnnnnnnnnnnnnnnnnnnnnnnnnnnnnnnnnnnnnnnnnnnnnnnnnnnnnnnnnnnnnnnnnnnnngcaggagctgtgagcagggcagtctttatattatcaaaggctctttggtgctcctccgtccaggtgaatgggactttttctttagtgagtgggtacagaggggctgccagcatggcaaaccctggtatccagggtctacaaaaacccgcagttcccaaaaactcacgtacttatcgtggagtgataggggtcaggatctgcatcacagtctttttccgtgcttcagtgagccattgcttcccttctcggagggtgtatcctaggtaggtcacctcctagtggcataactgggctttcttggcggacacccggtaccccaactcacccaattcctttaggagatttctggtcccatcgagcacagttcctggttcgaggctgtgagcagtaaatcatctacgtactgcaagagagaaatctgnnnnnnnnnnnnnnnnnnnnnnnnnnnnnnnnnnnnnnnnnnnnnnnnnnnnnnnnnnnnnnnnnnnnnnnnnnnnnnnnnnnnnnnnnnnnnnnnnnnnnnnnnnnnnnnnnnnnnnnnnnnnnnnnnnnnnnnnnnnnnnnnnnnnnnnnnnnnnnnnnnnnnnnnnnnnnnnnnnnnnnnnnnnnnnnnnnnnnnnnnnnnnnnnnnnnnnnnnnnnnnnnnnnnnnnnnnnnnnnnnnnnnnnnnnnnnnnnnnnnnnnnnnnnnnnnnnnnnnnnnnnnnnnnnnnnnnnnnnnnnnnnnnnnnnnnnnnnnnnnnnnnnattaattgagcaggcttacgtaccggcaggaggtgggtattccaaggggactggcagggaatcagtataccttgttgtaccagtctctggatatgtggtcaaatgccttctttagcccctggagtcatggggtactgtctgactgagacaggggtggcagccgcttttagctccactaccacgggtggcacttgtttagcaagactcattccagtctgctctgcccaaaactctgaaaaagctgtcagccactctttagggggcaaaatcccagtcttgggttcatggaggtgatattcttcctctagacttagaactaagcatgttataggggcttctcccatggtgacttctggtccctttggggtgaactgcacctgagactttaatttggtcaacaagtccctccccagaaggggtacagggcactcaggaatcacaaggaaagagagagttacttggctttttccaatttctaaacttctttcggttgtccaagggtaaagtttgcttccagttgctcctatgaccagagttttttttaatcctaattatcctaagggtttagtcaaaactgagtgttccgcccctgtatctactaagaaattaacggggttcccctccacagagagagttaccagggttcccctccacagagagtgttaccctaggatcggggagggggaccgagccccgacacccctaatcttccttgagggccaacatcttggggccctattgtttctttcggggggcaatctctggcccagtgtcctttttctttacagtatgcacattggtctttttcaagttgtagtctctgtcctcccgggggtcttcttgccctgttgcccaggtatcctgactgtcctctctctgacctttctctacctactactgcggccaaaatcttagtcaaattcctctcctggcggcgatcctgccgattctccctctattctgcctccttattttttctttcttgtttttcttcctcggtctgtctcttgtgatacactttatctgcctcttttactaaatcctgcaatatataatcctggagcccctctaatctctgcaaatttttcttgatatcagaggccgactgtcgtataaaagccatggctacatctgcctgctgtccctctgaggagggatcaaatggggtatatctcctatatgcctccatcagtcgttctaagaagacagagggtggctccactggaccctataagatttctcttacctttgccaaattggtgggtcgccatgtggcccccttgagacctgccactagagcccggcgggagaccgtgagacgccccctaccttccgcagagttgtaatcccagtcagggcggaccaaggggaaagcagcatctataagattagggagattggtgggggtcccatctggtcctggaacattctttctggcctctaggaggatcctctctctttcttcagtcgtaaagacgacctgcaagagttgttgacagtcgtcccaagtgggctgatgagaatacatcagggactcgagcagtcccatcaagcctgaggagttctctgaaaaagaggggtagttagttttccagttgtacatatcggctgactaaaacggccaatactgcagtgggactaattcccctggagctggggcgggtccataagccagtaatggtaaggcaactgtggagtcaggtcctgcgccagatccctctgggctgcggccccggcggcttcaagtcccggccgctggccctattttggaggccgggagtccgttggggcctgtgggggggctacatgaggaacgggttgaggatatgggggaggagggtggtcaaggaaggagacatcatcaatttcaggatagatccgcggggaactgatggagtgggcgccggcggatctgaaggaggcactttcggattcgtagccacggcgaccgtcgctgtccctattcctgatgtccaaggtttcatccaggggggtgggttttggactaggtcctgccacatgataatgtatggaacctgatcagggtgtccccctgtggcctgaaaaataatttgcttgacagcggaaataatagatagattaaaagttcccccgaaggccatctcacactgaaacttggccatttggaggaacaaaaagtccgccaaggtccttttctgacctctacacaaagattataagccctagtctcaatgtccgtccaatggtccagagtcagtgttagtggggtcgttacggtctgtcccatgtctacctctattacacacacaataaaaacaatcacaannnnnnnnnnnnnnnnnnnnnnnnnnnnnnnnnnnnnnnnnnnnnnnnnnnnnnnnnnnnnnnnnnnnnnnnnnnnnnnnnnnnnnnnnnnnnnnnnnnnnnnnnnnnnnnnnnnnnnnnnnnnnnnnnnnnnnnnnnnnnnnnnnnnnnnnnnnnnnnnnnnnnnnnnnnnnnnnnnnnnnnnnnnnnnnnnnnnnnnnnnnnnnnnnnnnnnnnnnnnnnnnnnnnnnnnnnnnnnnnnnnnnnnnnnnnnnnnnnnnnnnnnnnnnnnnnnnnnnnnnnnnnnnnnnnnnnnnnnnnnnnnnnnnnnnnnnnnnnnnnnnnnnnggccacctgcaggggacggtagccccaaggtgacgagcccatgttcttatagacagctagtaatttttttactcttcacacgcccatatcagctccaagccaaggaagccatgaggttcagcctgagtgggtaatcgtggacttggaaactcctagcaacccaatggcgataaagaccaaacacaggcatcttgccatctttagagagctctcagttccgtgttgcaaaactggagtctctagtttattgtgcatcttcctggctgtatactaaccatgctttcaaggccatgaggctatttctgtgtcctaacaatctgtcctcacttgttactcacacacctagtcctccacccaggtgcaagcctattcaaatacataggcacatagagatgcaaaccaggaggcattctacactgaggccatggtattcaatagcagaagtgctcacattagcaatacaattgtaggctggagctactgggtgttcttgtttactgaaaccagaagctggaccttaagtcattccataatcaaagttttttggtccccaacaattatcatagtctaagcttattacaattattccacttactatgatttttgtgcctttaaatatttccttcaattttatgtgtatgtctacaagtatgttgcctttctgaggatgcctggagagcacatcagaagccctggaatagcaaccatgggcagttgagacatcttgaagtggaagctgggagcaaatccctgtcctctgccagagcagtgggtgctcttacccactcagccatcttttcagctcccttaatgaaatgtaaaaccagcacattttgctattatcagcctgaagaggtgacaaactaagaaatggttgagaagagaatggtgagattgtacacataatttcatttgggaagtgatgatcaaatgtgatctagtcattaccagttgttaggcttttctttaaaaaggtaaatttactttgtagaaccagacctatctgttcccctggcctccattcttctgtcctccttttctcctcctgccctccttagcaaaaagaaaaaagaaaaaaaatacattagctgattctggttgaagctacttcttttgttgaattacaaacagttgatattctccagatatttaaatagtactacctcaaaagttgcagttttctgttgtcatctactccaggagctgccgcacaatctgaagatgagttcttggaggtttcctgtctcataacttcgaatctgggcttgtctatttttgtttcttttttgtttttatttgtttggtttggttttttaattctatcacatacatattaaccccacagatcttttccctatctcttccaatttagtgtatgggattcttgagtgtttgccagagagtatctgcatgtatacctgtttctctattacttatctttgctcttttccttctctttgttttgtcccaagctaatatgatattatttcttttatcttcttatgttttattttatttttactattactctatgaaaatatctttggaggcttttttttgtttgttttttcgtttagttgaaaatagactctcttcaattttctataaatagacataatttatcccctaattctactcttctaagtttctctctacatcccctcccatccagatccaccctcttaatgtctctcagagaacaaacaggcttctgtgagttcatatgtgcattgatcatgttgatatagagggtcttgtttgcatggtgtcctccatcccctctggttcttgtattctttcctcctcttcagtggggtttcctcagctctaagtagaagaaattgatggagacatcctgtttagaaatgagtgttccaaggccccaaactcactgcattatgtctggctaaatatctcttttatttttattatttattaatggaggaaacatctctgatgatggacatggccttgatctatgaatacagcacaatgcctttaagagtcttttttccccagtaatatatgttttaccctaagtccctgtgctatctagtctcaggttttgttcacctaagcagtgttgggtatagtggttttttgttttttttttttttgggggggggtggagttctgatggggtttctctgtttgagcctgtcctggaactagctgttgtagtccaggctggtctcaaattcacagagatttgcctgtctctgccccccgagtgctgagactaaaggcgtgtgtcactactgcctggtgctggatacaggttttctcttgtggagtagccatttggtgaaaacagatattcattggttactcccacaagatatgtgccaacattgtcctagcatatcttgtaggcaggatactattttaggttgaagggtttgtgggttggagtttaatttattatttggcatcatgcagagtacctttctataccaaaaacactagcacctaggggtaaagtctttgcctaggcttatgttagatttctccattttcaatgagttttgtgggtattatcttcagtaatggggacttgctgtcagtttttggagagcaacctatagtcttggtaaccaactaggttgtttggggtttcacatgggtcctctttggtggacaaaacattagatgtaacccaatcccaagactggaagcttcatttggtgacaaggaatggccagttggggctatgtctccccaattatttggcaatttcatttacatcacctttatacatgtacatattttaagagacttctattgtattaggtttccctattgcccctcaaatagcctttgattttagctgtctctcccactatttcctttgcctgttctctccattatacctgaccctcctgttccagcatcctccaccatcagtaaccatatattctatttccctattctagggtaatttgtgtactcataatcccttatgctatacctaacttctgtggttctagaaattgagcttgattaccattgattacacagatgatgagagagtcgatctggggggtatgggagaagggggcagagaaactgggacaagtggatgtagagaagactattatcaggagtgagtaaagaatctattttcaataaatgaaggaaaattaatgctagtttgagtgatcttagttatatggacaatacaaatctatgtgcagaaatttgtttctaatgtttgaagagtagaaaatcacataaaattttgaggtattcccaattttcacttttatcagttttatcaattttcacttttatcagtttgtttttagtagaatctatatttttcccagttagcaactttactaattgctactggtaaaatagacatttaatcactgtataagggccatctttatttttgatgccttttgaagcagaatgatgtcttggaatttattagtggcaactactttaattaattcatctagattttgcctgctatactttcattttctatattatttttgcacttttatttaaacatgcaattttcttagtaatatataagagaatattttatatttaatccaggctgaaaatgacatagaactatagaattaaattttcttaccttttacctctacttacatactgaagtattttgctattgcttaagttgttcattttgcctgtcttaaccattgtattttcttcagttcctttctcagatgcagagaaggaccagtgaagagcacagaggtccagaccaggctggtaaaacacacgcaaacagctgacctgaacatccgggaactgttgttccccagtatgatagctggaataccagcatgggactgatccagacccaaggaacatgggtttctgtgaggaaacctcagaaacctatgggacctcctgtagaagcccagtatttttccctagcataggagtggactttgggagcacattccatatagaggaatactcccttagccaagacacaagggggtgggcctagtccctatcccaaaggatagaaagactctgatgacaccctatggaaggcctcaccattcagtgggagcagaaaacatatgtgactgataaggttttagttgggggtggtagggaaggatgggtgggagaggggaactgggattgtcatgtaaaacaaccctgtttctaattcaaataaatatagttgggaaaaaataaagctgaatagccaataactaggaagagaaggatatgcagggctggcaggcagagagaataaataagtggagaaatctagtcttgagaaaaataagagaagacaaagagaggagataacaaggggaaagagagaccttacctggggctagactggcagccatcagctagcagactcagaggaggatggacacacagaaagaaaggtaaaattccctgaggcaaaaggtagataaagaaacaagttgacataagttaaatgagctagccagaaatgtgcctaaggtaggccaagcaaggccatgctttcacaactagtaagtctttttgttatgatttgggagctggttgatgacccaaaagtaaaagcctgctacaatacatgtttggagaattcaattatcatttaaacagttcttaaacactattgttatggtaatctagctgcaaaattgtcatagtaaattttgacaaatcatgaccaaatactttaatattcttcttctcatgtgaagaaaaagcctatctttgcttgagagaaaaagttagagcttgagaagaacctgaacaaaatatggatagcagtttctcagggatggggatgagtttattcctcttactattgaaattatttcaggtgtttccaaaactgctataatttatacaacaatgcagataatgatggagttttgtttttcagacaatgaaacaatggttttaggctccagacttcagctctaattctttaaagaaaacattacttctaagcatattttattgttgtcttatagtccatagctttttcctttttttctgtatgtttaaacagtcaaggtgtctgctcactccttgtaaatcaggtgaagacagctgggaacaagttcatctggttctgctcccttcaatccaagtatccacactgcctgaaccatgattgaggagacctctaggagaatccttactttcttttgcacagagacaatggaatgtaggaattcttctcctaaatcacatacacacacacacacacacacacacacacacacacacacacacactagcaataaaggggcaatttctgacttttgaagatcctctcacttactgcctgccagctagcagtctcctatattgtgtttgttgtctatattcagtgtagttttaattattatattttgggtagatttgaaatgagacattgtgttccttttgttcttgtgatgaaaattattttagcacttttaattctttgatggatttatacaaatttttaagacactttattttatttggtaaaaacatcggtggaatttggtagggatggcatggaatgtgaagtttgttagtatggcttttagcaacactcattcttttgctccatgagcatggagtatctttccattcctttctgtcatcccgatgagagagtcgatctggggggtatgggagaagggggcagagaaactgggacaagtggatgtagagaagactattatcaggagtgagtaaagaatctattttcaataaatgaaggtttttttttgaagacaattcaatgtgagaatatagaaatgttactgaattttgtaaattgattttacttgatttacactattaaattaattataataatttgttgtgattttaataacattattagaaagttgagacaattagttatttactattatcttaggtgtcttctgtctattttgcgaatatttatatggctaggaccaccaataccaatattacatttagtaaaatgtgacaagagaagacaatgttgacaatatttgatcatatatacaaacttccgtggttcctatactgatcatgcactgatgaaatgcatgcatttcttctaaacctgacttttggtggtggtggttgtggggtttatggaagagatgtgatgggtttattcctgtgcatacatatgcatgtggaggacaaaggtcaatgctgaacatcattctctccacctttgatttttgagataaagtctcttacttaacttaaagctaagaggatatggggttcttgtggactcttgtcttcacctttagatactgggattacacaaacacacatactttggggattctgcatgggtactagggatataatcctggattctgatgcttgcaaagcaaacactttactcaaaattagtttcatggcttctaaatccaatttttaaagtgatttttttcattttgaaaggagatagtatttatcaaacacttttacatttttattgtaatgatcatatgactatatttttaatcatgtatatatcctgtgttatatttatagattagcatattttattttcaatgtttatgaatttgcatattaagaactgttataagtccttgaaacaaatctgaatcagtagtcaaagatccttataataatgcaactgaaaattgttttctgaagtttcactggacatttataaatttacattcaataccattttggaatgtaatatttttgtttggttgggattcggaacaatttgatccccacataagagttttggacataccatttttaatttttggtatattttgagaaaaatcagtattatttatttcttcagtggccattgagctacgcctcttactggtgagacaggtcagattgtcatcctgttctgaagagggctcccattactccctgacagagcattcatgagtgctcccatcactcccagactcagcattcatgagtgctcccatcactccctgactcaacattcatgagtgctcccatcactctcagactcagcattcatggaaaaaaaaatggaatcttgaaattggcaggaaaatggaactagaagaaaccattgtgtatgaggtaacccaatcacaaacagacaagcatggtatgtcctcactcgtatgtagattttagacatagtgtaaaggataaccagcctacaatccacaattccagagaagctagtaaacaaggaggaccgtaagagatacatacatggtcccctggagaagggtcaagatctccagagcacattgggagcatgggaggaggggggaaggatctaggagactgagaaggggagaagaggagggatgcggaggacatgagggaacagaaaggttgagtcagaggaagaatagaagaaaataaaatggagataccatactagagagagacattttaggtttacagtgaaatcaggcagtagggaaatgtctgtagatctacaatgatgattccagctaacaatctaagcaagagaggagaggctacgttaaatgccctcccctgataatgagattaatgactgatttatatgccacctgatagccctcatccagcagcaggtggaagtagaagtagacacccacaactaatcactgaactgaactgaaattcagatgcagagaaggacaagtgaagagcaaaggggaccagaccatcctggtgaaacccacggaaatagctgacctgaacattgggaaactcttgctccccagactgatagctgggataccagcatgggaatgatccagacactaggaacatgggtgcagaaacctcataaatctacttgacctactgtagtagttcagtccttatccctagcataggtgtggatttgggagctcattccacatagaggaatactccctgacccaagatacaagggggtatgggcctaggccttatcccaaaggatgccatcgactgtgatgtcacccttggaaggcctcatcatccagggggagaagaagggatatgtgatagtttgggttttaattggggtggggggatggtaggggaggatgggagggagagggaaatggaattttcatgtaaaaacaactttgtttctaaatgaaataaaagaatctgaaaagaaaacaaaaaaacaaaaaacaaaaaacaagacctggtaagggcttgagacacctgtatcatttaatctagttttagcttggttgttgcttgcttagtggtttgaaatgaaatatgaacttttgagatcttggtgctctgcaatagtcatttattatatggtttttctcataggatttctattgatatgaccattaatttgatagctcatttattaatctttttcttaagaagttttaattagttatattttcttgatttgctgcttaattttttgttgttttctgttttcagttaaagaagatggcatttctatgcctttgtgaattttctaaatttatttctgttcttgatttctagttgcatgctagtattgttacaaatgatacaatacctgatgtcattctcttttatttgttaatatttgattcctagccttaaatacatgtacagcattccacatatggctaggaaaaatgttgaccacgcttttactggatgagaggtttgcagttgtcattccatccaccaaatttaagacttgaagttcaagtttttagtaacttcctatttagacaattgccattacttagagtgatgtaatcaagtcagagttttcctttctgtttacatctggtaaaatttgtcacatagatgtaagtttctcagtattaggtccacctgtatttatatcctttcaataagaattgttatttaagcactttatgggctcagtgtaaaatatcttacatgcagtttttataaaacagataaaaacaacctagataatttcgtctccattttcaaaactcaattttcatttttaattattttgatccatatatgttcttgaagatgaaatgaggttattccagatagtaaatatttgagtcacttcttgtccatttaaatgcttgtgctttatgattggaaaggataaacctttcaggtttaggtagtcactgttaggcaaagattttctaccactgtttcagtttttctggttttattatagattttgttatctttttatcctctctcaaatcatcatccaatgtacttagctaattttctgcattgatacctttcaattttaaactacttgttcttaatccataaggatttcatgttttttaaatatatttaccctctttatctttttacatacttatgcagatctgtgcaagacttgggctttaaggactttaaagaatgggacagactacagtctaatgctgtagacaattttacttcagtttcactgtacttttatatatgaatgtaacaaagaacacaatgattcaagaaaggttgtttgagttcaggaaattttgatcacaaaattatgtaaataaacaccaggaaagcacatactcaatattagcagagcagccctttcccagaactttctcaggacagaccatttgaacacagttgcctggcatgtactgcaggttatatgtgtgaaagcatgtaagaatgaaagaaggccatccccatattcagagtacactgaagatagcagtctatagctatgatatgacatccataaagaataaacacgtcttacaaatggaatgcaaatgtttaacacagaagccatgaaatcacacccaagaacaaccgagggcacaaaatgcacgggaggtaggaggtcctctgcttcttttcctggaacctctctcacaattccccaatgcattgtattccatgagtcattcttttgagcatctctaacacttatctcaagataagctgggcaatagaaacattatagtttttaaacataagctacatatttattatgcttctgttttatgtctgctattaaacttacatagaacaacaattctaataagctgttttaaactgatcaaagaaaacattctaatgacattgaaaagccctacatttttactactaaaactgcagtttatattttatattttgtaccaaaacttgaatattttatattttgtctatcttaacatttataattattttatttttaatgaacttatttatttttcattgcaactgcagtttcccctcccttctctcatcacagtccctccctcccatctcatctctgttcccacctcacaatccactgtccctccacctctatcctggaaagggcatgtttcctgtgaatatcaacaaaacatggcacaccaagttgcagcaagactaagcacctctccatgaagtaaggctggacacagtgacccagaacacggagtagggtcccaaaggcctaaataaccttttctttcaagagttattgcaaagataaaattaattttcagaacatcatgatctgttagtataatctcaattcagatgtggcttttatgagtgagttccttgctcgtaacactgtatgccttttacccctcatacttctgcctacatctttgcgtgaggagcaatcctctaggatctgagcatggaaataggtaaggggataatggctctgcctttcagtgttttgctactgacactggtgcccagtgcacaagcatccttgctactgaattggcaagtatatgccaggtctaagtgcttgtgaagcaacaggaagtcaggaagcaaggctctggagagcccagctcaggtctctgcagaagtttagtggcttcacaagtccagtcacatgcagagatatcttggttaatagttgctaaatgtgctaaagcatgttttaatggttgctattgaggtgtgatagcaaacagcacatgtttgggatcaaaattttgctgtgcatgccaaccctagaaaagcatcatggcagcatagctggggagttgagcttaaattctatagagacatggacctttggacatgcaagttggcttgctaccatgatgattcttgtcggaagtatggattgatgaggttcagccctggactagactctagcaggatactttcaaaaaggcgtgcataataacttagagaagtgatggctacagtatgaaagcttcccacactgaaccttgaggggttggagtcgttaccaaagtgccactttggcattccttggcaaatatagaaatgaatttcactatctcagtttcacacattctgttctcttcagaatagtccaggaaacctgagtggtgggggtaccacatgataaaagtcatcaacttctgcatcttctctgtctaattgttatgtggagtgtacattgtctctatctgttggatacagataatgtcctactcctcatcttctttactctgttggataaatgttgatatccacaatctactatcttatcgtgtctccttacttcatcaaatgatgctatctctttatcaagatgtgtcactctgtccatgacttagagcatggatttcaaatgtattagcagctcctgatgcaccttgttctggagtctgtttggtctaggaacaccaggataacataaacagacaaatcacattctgtttattgcaaaaatgatttcaagcagttgctttgaatttgtagtctgaagaagggcttgaagtactgtctcatagaatggcacagtataaattcataatgccatgattacaggtagtaaggacaaagactaattatacctcacttttgttgtgtcattgtagttgttgttggtagcaaaatacgaattgaaagaaaattgtattttcattattatcagtttcttaaatatttatctatcttcatgacttttttcccaatgacaataaaagttagtaaaaattttatgttgcattgagtatattcattaagctcaaaataaggcataaaaagccagcaagatggtccagcatggaaatgtatttggtgacactcctgacaacctcagtttgttcccatggactcatgtgcaaggtgtcctttgaacttaattgcatgttatggaatgtatagacccacagtcatgaaccacacacaaaaaaataaataacttattttctataaattgtgtacatttaatgagttttgacaaaaatacagaaccacctgaagggctctaatcaacagatctccacttccatccacatgaaggatgaaaacagatgtggtaaaaattaagtacaaaaatattccagatggccagcataattttcacaattcacaatttccaatttatataaacagagtaacactgagacagaactgaaggagcagacattaatttaattgattgatagccacatgcaacatatgttctactcattttgtagatttccaaaggcagaggaggaataggcaatgccacaagaaaacaccatcaacttcagcctcccctgctctgtaaacacttgacactcctgttttttatgagtgtgatttgctgcagggttcnnnnnnnnnngtaatgtgtttatattatatgtgactatatgcttttgtcctagttttcactgtcaacttaacacacccttgaatcaccaagaaaaagaagtgtcaaggaagtaattatccatatcaggttgcctgggtatagctaagcaagaatgtcttagttgatgtatgaagtcacagtccactgcagggggtaccatattgaaggcaggtggtcctgggcaatatgaggaagttttcagagtgaccctgatggagggctagagacagcacacagtgttctgtcatggcccctggctccattttcccaccctatggttcttccctgaccctgattactagtagctggtgacctggaagtataatagaaaaaaatccctttgttcccccaagttgctacaggtaacaggatttcatcataagaacaaaaaagtggcagggacttcatatctatggtttccctggatgagaaaaaaaatgagattttcccccacatctttccccatattcctgccagcatatttctgctatttgctctcaaaaatttagattatttaggtttctgctatttttatggaaagtagtttttttttccatgcatggtcttgctgcagtttctcctcctctaaatccttccatattctcttcacatccctacccacttaaatccacagccctcataaaacaaagaagcattttgaaaagataaaagaatagggaagaaaaccaaagaaacgtgagtaagtcaaaacaagtgaatgagctgaaaagaaaagagtcaaagaaaaagcaaaaggagcacacatacacacaattcccacacacacataaatcccatagtggcagctaatttggaagccataaggtttaagcaaaagaactgtaagggggaaaatgctccaacaaatgagaccaaaagaaaaaaagaataataagaaagggagaaactaaagaaaccctcccaaatatattgtgttttgtgataatcatctacttctgggcatgaaacctgccctaatgtatggtttgtatgcccattgagacttcatcaaataaaactaattctcctttggaagtggtcaaccttggaaacagtttctggattagggatgggggcttgtattcactttatgtctcagataaccagataatctgataaccagaagtcaatgacatcactcactcaagataattttgcacatggtccaagaccccatgatgaccacagtgcagtatacaagcagagaaaagtaaaatatgttgaacaggtgagcattcttgggacaatgagcttgggaccttaggaatttagattgtgaaccttgtatgatgaccctcagcaaaataaaatataattttcatgtgctaatgacctgtatctatattcttgctaccaacagttgacttagtcagcaggatctttaaagaaggtgaaactaaggtgtcatcttcttgctcttccaataccatccctagacttagagaggaaggtgattttctgactgtatcacatccatccaagaaggcaagggcttctgccttaagactcagtagtggagagggggttacaggagggaaggaaccagaaccccgaggaagaacctctggatgaggaactaactcccatgaagtaacaggcttaagattaggcagcaggagaagctctcttatctttacataggggactggaaagtcaagaaaatagttagaaggccagatcttaaatttgaaaagctgggatttcagacctactctaccagcaaaataaattggtacttcagaaacagggaattaaaattcctctattattagcaaacaaattgttaagatgtagagaatattaagaattaagaaaatgaatggaaaggacaagcattgtcccaagggtaggtgggacagaacacatcacttagtaaaacaaaatttacctagtcttaagaaggaacctaagccttttggaggagttgatgggatgcgggttgcaggagatcaggggtgggtaagagaggagggaggggaactgtggttagtatgtaaaattaatacaagttttaaataaaaattaatgaacctaaagtcaatattccattgtccaccccagtgattattgagtccttgctagagagaacagatcccctcagaggttactgtgttcttttgaaaagtaattaaagacattgcctctgataggatgaaagacaaacagttcactaacaacttgtcagaaagatggagaataacccattcagagaggacttggaggaagttcataagggcacagtgagattcctcagtgacaccaagatctgtctaccagtaactgactgtaaggttaaggctactcctagctgtttaaccagtcatactcatgaaataccatactcatacctctgagtaccataccatacataccagaccatccatgtacaaagaaagagctacagaaaataagacaagattattgcaaaaaggagggaaaggatgcatcccacatagctcatttatggaagaaacggaactaatacagtaatgttaacatcagaagaaatgaagaaaatcaaagggattctagaaaatccccacatatttgaaggcctggaactaatattagatacagctagagggaaaaccctccctttattgaattgaataatggaatcatggagactggctttcctcacacttgttctaactcaatttgaggcagaattacaatagaaaactatgaaaaaattaattgaaatggctagaaagttgggtacactttacttaatttacagtcgtagcccaacaccacaattgtatgcactgctgcccagcatgaggaaaattctaattaaaggtgaccctcggaatttgataatgttatttacagaaactctggccaattgccaaactgttggagaagctattaactttcataaacagactagaatactagagacagataagatagtatccttccagtctaatgtacagaatcaaaccaaaccaacaacagagaagaactcatccctccacccaaggcttcatctgataaccagaacccagtggcatcactctagataaccagacataggtctagaccacatgacacttactagacagagttaagcagagaccaagagcaatgcactgctctgcacttctggagagatgccaccttgatctgccctgtggctggagaatttcccccaggatcctgagcttcaaatcaaagacttctgttagagactggacctgatgtcacacacatgagtagccttggggagataggcttaggatggtagttaggaatttagaatgtgaaccttgtgtgataactccaaggctaataaaacatgattttgttatactaactatatgtatctatatgaatcttcctgctcatgacagttcccatctactgcacgaggaatcttcccagtgatagctaaatcagacactagtctatgctaatcaaagtcattttattgctgtgttcctttaagaaaacagtagtatttggttttcccctaggtccaaggcctatcttgtcttgagttcctatacttcccatggggtggaccttaaatacatcagatagtggtttgtttctcccacaaattttgtgccacagtttcacatctgtattatgcagtcaggtcatcattgtagatcttaggctgtagagctgggttggtgtttatctttggtgtgttgagagtaccctacagtaccaggaactctgagggtaaagtaagagcaataagggtgaatatggctcaagacaggcaattgttcaacttctttgcattcaattaatacaaggtccttggtaatgatagcaattctaatttgtgtatgatgttatcatagtttgtttttgtcaacatgcacaaaccaagatgtatctacaaagagggaatatgtgttatagagttgtctacatcagattgactggagatcatgcccataggtcatttcttctttgccaattaatttaagaaagttaagtccaatgaaggacacaccatcctgaccagtgggcctgaactgtgatataaagctatttgagcagaagtttatcaagcagaaaatattgttacactggtctctttccatttctgcttccagtttccagtcttatgttcctgacttaacttctctaaaaggtaggttcaaacctatgactcaaatagacccttttctactccatagtagaaaagtgttggtttgtgtattgtttaagtttggtcagtgaaactacatttaatatttaagcctattttatatgtttccaaatgtgtattagcggtttttatttcgttgcttgagaaatgcctgtttaatttatttgcctattcatttaaaggatgatgattttggatttgaattattttcagtttttttttttttgaatctcagtattaaccccatatgtagtttatgactagcaaaactttccacatattctacaggtcatctctttatactgctcttcccttctttctgagaagaaacattttaattctacttattctcattttccataatctcctgtgctactagctgcgttttataaagtctatgcttgtgcttatttttagttcctctacattttcaacaagaagttgtggatgtccaggtcttttatcaataacactattatatttttaatggctttttgtaaagggtgatctaagcatctaatttactcttccatgtgttgattccaatttttccaatcactatttgggaaaataatctcaccccaacatattttctgacacctttgacaaatcctaagtgactctctgttacaatttgggatctggtattgtgataagtccaacatggcagttactacttagaattcctttatctctaacatggtttgaaccttcatataaaatttgggactgccttttctacctatggtaagaatgttggtgttctgactttcattgtatgacatctgtagattatctccataatctaagtaatttcaaaaggttaatccttcaaatttataagcacaatgattaatcccatattctaattactttacaacttctccctggagttaactaaagttttcatagtagaaatctgtttccttcttaatattattcttaactgtctatatttgaaattttgggtatgggtttttccctctgattttttttattggcttcttatattggaaaatcacagatgtagtagggtaattttttctttgctatttttctgaaagtatttatcatctttggtggcttttggttgggaattttgtttattttaattatagggtcccaggactgattatgacttagctagtaaagtgcctatcacaggtgaactcagtgtccatcaccagctccacataaacagccattgtggcacacaccagtaggctcaggaatctgaaggtagagacaggagaatcagaagttcaaggtcatccttgttcacttagataatcccatgccagtcacatatttgaggctctgtcttaagaacaagccaagcgagggcaaaggaaatagctcagtttataaacgtacttgttgccaagtcttaacatgtttgtcaaatcctggcctcacaagctaggagagaaatgacttctacatgttattttctgacctctatacgtgtgccttggcccccaattcaataaataaaacaaataataattaaaaattcattcaatgaatagtttcttctggacttttaacaggaagttgtgttgaaaatttttttctgcttctgttaagatgacatattctgttaagatttctgttctttgtttatgtgctatacaaaactcactatatatttatcaactttgactccttgaagagaaaatctcttggttatggggttgaacttcctaatgtgttcttgaattctgttaacagttattttatttataatttttttttgcatttctcttcagcatggaattggtcaatgttttctttgtgatttgtcctgaggaaaaacatgttgatatcaggttttactgggtttcgtttcctctttgggtggacccaagtttatgttatccattttcatttctttttgggagagagtatatatgctctgttttctaatatggaaaaaaatgttttccatccttcaccatgttagagatcagtagaaagaacagtaaataattataggtctttattcttacatcatcctatgattacaccacagtcattgagtttcactggtcacattaggaaacatctgaacttcattatactcttgtagttcagatatctaaaattgtgtaatctttggttacatttattttgtgtgtttatgtttgcatgtgcatgcacctgtgtttttgacagttagaagacaacttagaggaaatgattatctctttgtaccttgtagggccagggtagtgaacaaaaggcatccagcttggtggcaggtagctttatccattgagctctcttcctgattcccatgattgtttttgtttgttattatttttcttttcacatgtgactggtcaaggcagttcataagttcctaagtcttgtactgttgctgaggccatttcaggtttaactagaatttgatatccttgatggagaatcttagggaaaatttcacaactctattttaggaaccaaaggtgacggtgtcctagctgacttagcttctcttaaagtgcctgtttttgtggaagcccctccagataaccacttatctcttagcttctgctaaacctgcttccttcaaactgtttgcttttgttaaagccccctgttgatgctgatgtctgcagaatgagattccaggtcatggtttttgcctgtgttctggacacttggacctctcctaggtccctgaacacttggatgtggttccagataatatttaatggattaaatattatctctctggagagcaactggtaacagaaattagctgttaattgtgtgcctcattgttttgttcaatcagaattaaaaatgaaagcctaacacactgagataaagaaagcaagtataaaaagaggaatagaatacattgattagctgagtggtctgtataagtagacaaaaacagggaaagattttatgaaatactctcgtctatcagtcctgataataagagtgacaaaccaaagtgttgtggctctttcaaacccctcagctgaagtgatttccgtcatgaatgttgcaccagcttttaaactcaggaacctcagtggggatgcaaatttacaatttgattaaaaacactcagggtccctgtttggcaaaatttgatttacctctggccaattcatatcctgccattccaagaactcactttgatattgaattggaaagttcaattttcattttgtaaaatggctttccaaggatggagtagagctccatgcagttagcttatcatggtcatgctgtgtgttaaagatgaatttttaaataaaaagcagctcataagtcaacaggaaagataattgttgatagtagcaagaactgaaatgaaggaattccacaaatataagcctttataattgcaaatcaaagttatagtttctagctttttagatttcttttattgtagacgttccttctgcctacaatgtacctttactgaaaagaaatcaaccacaatgcactatcagctttctttagttcacaaaggcacatgcaaacatgacttttacatgcaaaaacaagggaaagaagagaggactgggaaggtgggaagggcaatctataacaacagctttgggtttccttacatattaaatacaatatctcatcagtttttaaaaatagcaaccttctggaccacaaaagaaagtcccctcatcacataataattaaaacaacaaacatccttcatataaaatttgggactgccttttctacctatggtaagaatgttggtgttctgactttcattgtatgacatctgtagattatctccataatctaagtaatttcaaaaggttaatccttcaaatttataagcacaatgattaatcccatattctaattactttacaacttctccctggagttaactaaagttttcatagtagaaatctgtttccttcttaatattattcttaactgtctatatttgaaattttgggtatgggtttttccctctgattttttttattggcttcttatattggaaaatcacagatgtagttaattaactacactcgcataaacataggcatagatgatcccactctacaaaaacacaaaataaaaggcatcgtaaatccacatacaataccagtaccaacaacaaaccaaaaacaaacaagaataaacactcaatggaccttaatttccctcaatattaatggtcttaacttgcctataaaaagacacaggctaacagattggattagaagacagaatccatgcttctgctgcatacaagaagcacacctctaactcaaagacagacattatgtcagagtaaagggttgggataagatactccaataaatggacccaagaaacaagcttgagtagctatcctagtatctaacaagatagataggttgattgacttcaaactaaaatcaatcaaaagagatgaagaaggtcatttcatattcattacaggaaaaatccatcaggaagaagtctcaattctaaannnnnnnnnnnnnnnnnnnnnnnnnnnnnnnnnnnnnnnnnnnnnnnnnnnnnnnnnnnnnnnnnnnnnnnnnnnnnnnnnnnnnnnnnnnnnnnnnnnnnnnnnnnnnnnnnnnnnnnnnnnnnnnnnnnnnnnnnnnnnnnnnnnnnnnnnnnnnnnnnnnnnnnnnnnnnnnnnnnnnnnnnnnnnnnnnnnnnnnnnnnnnnnnnnnnnnnnnnnnnnnnnnnnnnnnnnnnntataccttcttttcagcatcacatggaaccttctcaaaacttgaccacattctccaccacatagcaaacctcaacaggtacaaaaatttggaataatcccctgtgtcttttcagaccaccatgctttaaatttagaaatcaaaaacaaatcaaagtgcaaaaaacctaccaactcatggaaattgaataacacgtaattgcaccattcctgggtcaaggaagaaacaaagaaagaaattaaagactttctagaattcaatgaaaatgttgacacaacatacccaaacttatgggacactttgaaagcagtactatgaggtaagttcatagctctaagtgctcacatgaagaaactagagaatagccacaccagagatttgacatcacagctgaaagctctagaaaaaatggaagcaaattcaccccagaggggcagacagttgccaggaaataatcaaacggagggcagaaatcaataaagtcgaaacaaagaaaacaattcaaagaatcaataaaacaaaggggctggagagatggctcagccgttgaaagctaggctcacaaccaaaaatataaaacaaagagttggttcttcgagagaatcaacaagatagaaaaactgctatccaaactaaccaaaaggcagagagagatcatgcaaattaacagaatcagaaatgaaaagggggacataacaatggacactgaggaaatccagagaatcttaaggtcatactttgaaaactgtactccacaaaatttgaaaatttaaaggaaatggacaattttctggacagttatcacttaccaaaattgaatcagaaagagataagcaaattaaacagacctataaccactaagaaaatacaagcagttatcaaaagtctcctaaccaaaaaaagcccagggccagatggattcactgcagaattctatcagaaattcaaagaagtgctaataccaatactccccaaattgttccacgaaatagaagcagacaggacattgccaaacaatgtccttaatagccaaggcacacaaagacacagctaagaaagagaactacagaccaatatccctcatgaacattggtgcaaaaattctcaataaaatcctggtaaattgaatacaagatcatatcaaagaaatcatccaccattatcaagtaggcttaatcccagggatgcaaggatccttcaacatatgaaaatccatcaatgtaatccaccatataaacagaatgagaaaaaaaaaacacatgatcatctcactagattcgaaaaaagcctttgacaaaatccaacaccccttcatgataaaggtcttggagaaatcagggataacaggaacatacctcaacataatataagcaatatacagcaagccaacagccaacatcaagttaaatggaaagaaactagatccaattcctctaaaatcggggacaaggcaaggctgtccactctctccatacctctttaatattgtccttgaagtcctagctagagcaataagacaacaaaaggagatcaagtgaatacaaatctgaaaggaagaagtcaaaatctcactatttgcagtcgatatgattgtctatattagtgacctgaaaaactctaccagggaactcctacagctgataaacaccttcagcaaagtggcaggatacaaaattaactcaaaaaaatccatagccctactattaaccaaagacacattggtgaagaaaaaaatcagagaaacaccacccttaacaattgccataaataagataaaataccttggggtaacactaaccaaaaatgtgaaagacctgtaccataagaattttgagtctctaaagaaagaaattaaagaagataccagaaaatggaagatctcccatgctcttggataggtaggatcagcatagtcaaaatggcaatctttccaaaagcaatctacagattcaatgcaaaccccatcaaaatcccaacacaatttttcagagaccttgataaaacaattctcaactttatatggagaaacaaaagacccaggagagccaaaccaaccttgtgcaatataggaacttctggaggcatcaccattcctgactttaagctctactacacagctatggttctgaaaacaacttggttttggcacaaaaatacactggtagacaaatggaattgaactgaaaaccctgatattaacccacacacctatgcacacctgatttttggcaaacagtccaaatttatacgatggaccaaagagaacatctttaacaaatggtgctggcataactggttgcagatatgtagaagactgcagttagacccaagcctatcaacttgcacaaaacttaagacaaaatggaccaagatctcaacataattccagctacactgaacctattagaagacaaagtgggaaatacccttgaattaattggtacaggagactgcttcctgaacattacaccagtacaacagacactgaggtcaacaattgataaatgggacctcctgaaactgagaagcttctgtaaagcaaagtagacagtcagcaagacaaaatggcagcgacagactgggacaagacattcaccaaccccacatctgacagagggttgatctccaaaatatacaaagaactcaagaagctagtcccccaaacaccaaacaacccaaacaaaaaagtggggttcagaactaaatagacaattctcaatagaggaatctaaaatggctgaaagacacataagaaagttttaaacatcttagccatcagtgaactgcaaatcaaaacaactctgagattccatcttactcctgtcagaatggccaaaataaaaaacaccaatgacagttcatgttggagaggatgtggagaaaggggaacacttctccactgctggtgggagtgccaacatgtacagccattttggaaatcagtatggctactcctcaaaaaaaatgggaatcagtctaccacaagatctagcaattcctccctttggcatatacccaaaagaagcacattcatacaacaaggacatatgttcaacgatgtgcatagcagcaccatttgtaatagccagaaactggaagcaacctagatgcccctcaactgaagaatggatagagaaaatgtggtacatttacacaatggagtactactcagaggaaaaaaaaataatggaaccttgaaatttgcaggaaaatggattgatctagaagaaaccattctgatcgaggtaacacaattgcaaaaagacaaacattatatgtactcactcatatgcagattttagacatagagtaaggattaccagtctacaatccacactgccaaagaagctaataaacaaggaggacactaagagaaacatacatggtcccctggagaaggggagaggttcaagatcttctgagcaaatttggagcacgggaagaggggtgaagggagctaggagaaagagaaggggagaagaagacggatgcctaggacatgagagagcagaaagtatgagtcaggggaagaatacacgataacaacaatggagatatcataatagagagatttttggtttacagagaaaccaggcactagggaaatgtctggaaatctacaaagatgacaccacctaactatctcagcaatggaggagaagctaccttaaatgccctcccctgattatgagattgatgactgacttatatgccttcatccagcagctggtggaagtagaagcagacacccataactaatcaccaatctgaactggaacccagatgcagagaaggaccagtaaagagcacagaagttcagactaggctggtgaaactcacagaaacagctgatctgaacatccgggaactcttgttccacagactgatagctggaataccagcatgggactgatccagacccaaggaacatgggtttctgtgaggaaacctcagaaatctatgggacctcctctagaaacccagtatttatccctagcatagatgtggactttgggagcccgttccatatagaggaatactccctgagcctagtcacatgggagtgggcctaagccctctccaaaaggatatgaaatactctgatgaaaccctatggaaggcctcaccatccagggggagcagaaaagatatgtgacagataaggatttagttgtggggggtaggggtggacgggtgtgagaagggaactgggattgtcatgtaaagcaatcctgtttctaattcaaataaaaaaagttggaaaaaatagcaaccttctacatattaaatgggtaaatggtagcttaagtgtctgttagctggatttctgctatgtcatcagttatataagactaattcaatcaaagattgaactcaagaaatattgtcaacttgaataagaaccactttcagagtagaggaaccctgtgatattttggaaatctttgctgatattctgtaggcgatgtgcattgacaaattttaaaggaggaaaaaaaaatgacttctggagtttcaggaatgtccttgggtgataaactttttatttgcagatactgatcattgcttataagactgtgtatgcattgttatttgttacaggttgggaatacaaaaattcaagaagcattgagtaaaaaagaatataaattattttagtactattatcttattgaatgttgacatgataaattgtgtatcagtttgactagatatgacatcattacaatgatgtcacactgcatgtttttcatgttcatgcacagttttaaggaagttcagcatcacacatgtgactcacattaccaatctactatattatacaaccttaaataatccatgtgcccagaataggtactagaggagaaacctaaacactgatgggactttgtcaaaaaaaattctgaagtttccaagtatcacaagatgcacatttctcaaattgttttctttatagtcatatgcaaaggtaagggaactctcaatcattatgtacatctacgtatcatttattttacccaatgataaaaaatcttcatgtctttgtgtatacaccatcttttactgtttcctgtagaatccttgaatactataactatgcaaaaatgtaatgaacatcaacaataaaatactacccagaaattaattatctacttctataggtttcagaaaatgttccaggttttcatgtattataatgaaaccataaagttttatcaaggatattcacctatttatagaaattatgtctcagagaaattatattaaactttaatgtgttatcttcataagacaacttctgttacactggcagagtttaaaagtgttcctttttgacctttctgaggaaatgatgctgctcacttccgtgagctgacattgtgtctagtaccaactggaatgggctcccagtggaaagcaaaacttttctttcaagagatttttttccactagagaactactgtgtcagagtaagacagtgacacagaatcaattactaattttaaggattattaaggcttaagagtagaatgaaataaatgggaaagagaacatttaggatgtttcaaataatgtcattctatgatgatggatttactgagaaaataaagtatcatttactgatgaagcaagctagtagaaactagataatcaaattgctttacctgagcaatagacagatactattggcttctaacaagaaataaacccttgtataggagatacatctggagaaactagaaatcaatgatgtattctagaaataatttcaattttcccttcctatgtgtagttatatcaagaggttgaatgtgagtgtgagtatcagacagggaccagactgggcttaaagtccaaaaacaattggtgttcatagaaaaagaatcttagatatgcactaacacaaaacaaaagtagctgatggaaagaacatgtttctaaaacttgccctgtgtcaagaaaataaacattggcaaagaagctgtgaagagacaggctcacgtgccacaatcttgcacattacttatggggaaaggggaaaattcagaagatgtctatatatctgagaaaaaatgataagtgaagtccatgagaggggatgagacactaaggcagatgaagcaatgccagctgtttaccagaaaactgtgtgtgctatacattaaccaacaaaatcatattttaaattattcttttatcatgtttacatcttcacatgaaacaaaaatcatataaggttcttattgctataaagtttgtcttttgtttgagcacagatataagcacagttggttgaaaggcatacagttaaactggcatggctattttcataatgagttaatccccagagtctacctatcatgagaaactagaatgtctgggatcatagttcacagagaaaataaggatccagatcgtcaacaaatagctctgaattgctactgcatatgggccatactcctaagtactaatgtgcaatttcaatgtatgggtgatttgaggtggatgatgccagggttaaagtactaaaatttgacatatatggattaatgtgttctatctggaatatgcctctgtacaaacacaaccaactcaataatatgtcattattttaagttctaattgaacaaagtttgcaatgaaaaatgagacaatttgcgtattaaaatattttgagctcagagagtgataaaaacaatgaaagacttccctagttctcttcaacaaaaggctgtggctctgttctctgaagaaataacatcttctacctggtaaattcttaaagttcttttgaactatacttgcaagagtgaagctaggtgctgcttggggtgacagcccttggcaatttccacctgtcattctgtgaaaagggaatgtgaatttattagatggttgcttctttgtgccaaaaatgagttgacaagagtggaattggttgtaataaacattcaaaggactcttgagatgtttcacagtttgctatgtgacctcaaatttgaacttgggatagtataaaaaatagaaaattttctactaacttgcatttcacaaacaaagaatcagcctcaacataaaacagatttgcatagagaattaaatttcatggctttttattaactgcttcataaaagtctgccatttgatgtcatatgtaatttatgtatatattcacatatatggattaatgtgtaggttaatcctaacaatgtttcaagataactatctttcttactaaatgagaaaatatggctatgcaagctgaggttcaataacttagtaactaacattacagtctttcaatcaggtagccgccaggatttcagcaaggaaattaaaagtttaagaaagacgaaaatatgaatgcttaaaattgagcacatgtggctgttgttatcaatctataaaagatgctatcttacttattaagtttatcagattgatactctcaacaacaaagtagaaaccattttttcagttgaataaagtgatgttgggagaggatggagcaattttccttcattggagaaaatttacagaacaaaacacagagaactagaaacatcaaaaagaaatgcctattgtgaagattgctatctgaagactgatcagttatacgagcttggcaaaataatgggttgggaatgcattataaaatcagagaaatagtttctatttatgcaaatacagtaaagaaaaaaactagtgattcaaagaaaggatatatatgttagaggcatgtaagtgtgtaagtgtgactgtttaatatgtttatgtgtgtgttatatgtccttatgtgcaaatacatgtgtgtatgtaggttagggttgggttagtgtgagtatattgtgcctttgtacagatgaatgtgtgtgtttctttgtgggttttctcacctgtagatatagagttcagaggtcaatatcctgtactttcttctgccactctttatactaatttctgtgacaagatctatctgtgaatctggaattgtcatttgactagactggatggtcagtgagctacgggactccatcaatctcagctctccatgcatactcctttacatgtggtgtttatgtgactgttatgcaggctctcactaaacatggtgccgtctcccaagtaaatgtacaatttgctgcaaggaacatattaaaatatggacttaaagtattatgcagagcaattacatctttgaaggggaagtagagacaaccacataggactatccatataaaaaaagtgcttaatgaataattactttgcttttactagcatgtgggagtaagaatccaaacaatcggcagagagattctggaccaatgataaaatattacctcataacaaaatggcaatgcaaagctaccagatcatcacagggttgctcgagatatcttaaaatgtgtggcttcaaaggttacacagtgtattctgaaaatgcccccatcatgttctttgttgcaaggtcagaagtatgctacattaaaataacaagttttagttaagacagacctgtcatgaagagaaaggcaaccagtcagaaaatacagttgcagattagatgtctgttgctatattgcatagagagatcaggtcacacctggtgatggcaataaatggctaagatactaaagaaaagctttaatccaggaaaatatgatgtctgaaagtagaattagggaagatgtttaaatgattatttcagataatgtgaacttgtgttttgtggtccagagataggaggaaataacaaaagtaaagcttagatatggttgaaaaggggaaaaaattctctaaacagtagaaacagtgggtgtgttctgccaggatgttagctctatcttctccatgttggatgtttttaacatagacataaaaacttattaagtcaggaggcagcataaagaatggccagccaatgctttgatacagagctgtataatgacagagacaaaaataaaatgtttcttcaggaaggaggtctccaggggattcctaaggccaggccagtttcatttcagtaagatcatggggtattttggtggctaagtatgtgagtatttgtgaactcctgacgacactgtattccaggggatgcatgagtatctcctggttataaataagataatatctggggaaaacgtgaataaacatagttatttaagagaaaaatcactggtaaaggcttgggataccttgaacactgacagcttcatgaagatatctgagaaacattgtgggatcaatcaaagttttcttgaggtattatcatttaaaatgacattctattaaaatgatgcattggcttagttatatgttccttccacatatttttcaaacagtcttcagacattttctcctgtgggttaataaaggggtagagaaaccagaaagcaaagccagggaaaggtgcaaggaaagtacagaggcaaaagtccactcctgctaagtcagagtaggtccaaaatttgtataagggccactcaattgatgagtttccttctagcacttgcccgtcttagtcatagaatttatttttattactgaaaagaaagaaggaatcctcactggtaaacaggtgttctgatgtgcttttgtgtgtctcctgcccattgcatgtccaggtgggggctcggtgcctgcatttggagacagtaaaggcaggaaaacacgaaattcctgacatttagctgtccattccttttctttggtgcgtccacttgtgtgcaggggaagtataagcactgctctagaaaatgtgcagctcatccattgtcctcttcatgttctacctcatggtgcagcttttgacagtgttcatatgctttgatatttgtgatgagggacctaaatgtctgataatagggaagtatataaatttcttatttactccacaccatgtgattcaatctgttataattttagctctttatgtatgattttttaaaattttatcttgctcatatcaaagtataattacatcatttgtctcctcccctttcctttctctaatatatatattcctaaatatttgaatacagcattctcagtccctttaatattacttcattgtatgtaatcatatattattaggatatcaggactggccacttggtgttggatagtgaattgagaagctcttccctgggtaaaatctgtgttatttgcctatatgtgccagtatatgtgcaagtatgtttaccatgaaaaccagtcctttggaagaagtgtctcagtcaagaaccagtttagaacttcaaattcctgtatataaagcttttggtgtctttagtatttggtatttattttttactctgggaggaaacaaagagtagccaaaatagccgacaatatttgaggaatctcttagccaaccctgatcaacaattcaaaaggggatttctcatgcctgttgttggggcttttttagatgatctatgactttttgtggaggcattgaaaactcagatggggcaattaaattatattctcactatgccctccatcattccttattaagacctcccattttgcacatgtctgtaggggaaatgttagccatgccctcttgggggctggcagaggtaacacagaccatgcacactagtgtgtggtcagtgatgtagcaagaccttaatatgagggttgcacacaggcagctctatgttccatggttcccctggtttagaggattgactcactgggtgagtattttcctattaaaacatctgttcatcaaatttggtctgactcctttggggtacacattatttgcaccccactttacatgtccacatactagtcacttttatcctgctctttccttctcattgatagactcttcaacagcctttttcattttccaggtattcctgaggttgcaggaaatgcttaacaaatcaaaactcaatggaaagtatttttattttcagcacattgtattacatgatcataagtgtcatcttatcattacagtaatttttaaaattgattattttacccaatgttctggtgagaaaaataactttacattcaataaacagtttttagtagacagcaagacagcactagcctctttaaatttgttaatcttcaagatctatccatcataaaaatactttttaaataaaataatatcttttgcttagcttgtttcctaaccataattttgtcctcagcattataataatctattaactaatattttgtagtctttttatttatcatttattgcttggtaacttcacactcttctaattagcttaaagattgagtttgttttgtcattttttcctggcatattctggatatgagaaagaaactgttaaagtagacttgtgaatataagtgcctagggaagaaaaagttggaaccaagtcatatgcccatgtcagttgtctgatgcattgtcagaaaattatttatttcagagatatggctcttgaacaaaagtgaagttgttcagcaattaattacagcaaataagacaaaaagggttctctcaaacatttcacataaatgctgagctgacagagaactgcttggtcaggccttgagtgtacagggtctgtggtctacacatataaacccaaggcctgagtcccaggaaccggagacctttgtctccatctgtagaggtcagaaatgtacaggtgcagctgatctgcccagaagtttgtttctaggtgttcaccaccagtagtcttacagtccatgaatagaaacccatcattcaaagatgctgatgacagcagcaggtgctagttagttctgtagattccatgctttggggatgtgtgattcttgtttctaaaggggcctatttttaaaggctttgggtgttaggaacctggacccttataacttgtagctctctggacatcctttggtgacaagcagcctatagatttggctcttcatcatcttttgccatttctacatttttgtggtctcagaaactcatcactacccctatttctcccatcagtggctttctggagttcttcactcatcaagttgctaacactgctgctactgacattgctgcctactacttgttgcctgctactgtttgggatgctgacactgccgaaaatattgctgctgtcactgctcctaatactgcaaccggtggtttctcctcttcaagttcccaccacagtctaccacactagtgagaaagaccaagagatggcaaggaaggccagctcagtagaaattttcacaaaaatatttgtttgtccatttgtttttttttcattgttgttgttatttggtttggtttttcgagacggggtttctctgtattgttttgaagcctgtgctggaacttgcttggtagactaagctggcctcgaactcacagagctcctcctgtctctgccttccaagtgctgggattaaaggtgtgcaccaccattgttgggataatttttataaaacttaatgctgaaaagaagtgatgtctcctagttgactcaaaatttaaaaggaactctgttgtgggaatatgttctgccaatagattcggggtaccagcctcagggtatggtatattgtctgcagatgtgactgcttaaaaagagaaatgggggtcttattctcttgggttgtggagatcaggtcaggcatcatgaagctgagtgtggtttgttcccagctcctttgcataaaacagaagaattctgcaactggttataccttgtactgtatctgtgagtctctttccccatagcactccttgataaacacacacacacacacacacacacacacacacacacacaatcaaaaatcacatacacacttttaatacatacatgcatatacacaaagatcccatttgacaatcaaggaattttctctgggattcttgactaagagttctttgtctttcagacctgtttgaagatggcctttgcaaggtagggaacagagagggttgtggctctctgtgatagcagttacatgtgacacatgctctgcaatacttgtctagagtgcaggatcattgctctagtgcccagtgtgaaggaaacaacctacttgaagcagtgctgaaatctgactacagtgtcctatgaagttgaagtgaacatgtagttcttaagaattctctgcacaaggctgccaagtgtaattatggacagtgtttgttcaatgttccactccatgtagttttattagtcacaaaaaaatcctcaagctgattacagtaaaagataaagtctgaactaacatcatgatcatacttaacaaatattcaacaggttctacaggccctggccagtcccaaactctagagagtgttgtatccctcagatctgcctcaatcatagtatcaattaaaactcttattttaattagagtctcaaaaacaggaagcataatagcaaagtttcccaagtgaagacactgtttctttgaacaaaatatatataatctgctccccagtagtccactaccttatgttagaaagggaagcattaaaacagtttgaatacagtttgaatacagtttgaaaactgccccatgattctttgaaaaagttatcaataactgaggaggagtatagcagttaattaattagtcaattaattaatgcattaaactaggtaaacattttaattagagataaattgaattttgatgaacatataaatttcattgttgctaaataacatttcatataatctaatcaaaacactgaagttgcacaattaaaaatatattatagaaattattttaaggaaactaataaagaacttaatgaaaatgtaattctacacttttaattaaattcatgtccataaactgctttttaacctattgtcttaacatcttacatttttcagtaaagtaaagcatttgggttgcttgatgttaggatgcagatttagtgtgaaaatacaaaatttctagatatatatgatgtatatcctaatatctaaacatagggtgttctgtaaataaataattatttttatattcaggaaaacttccaaactatctcacaatgttaattataaagaccaattaggtattatttaaatatacatatttctttatcatttatgctgcctccttcttttgcatccacatgaactaatgtccattctgacctttctttattgcttctaggctcaggcactcatgattcaccagttccaagccattggccttcttttgcatgcactcatgtctcagtactcatggatattacccaggtctatgagtaaatactttgatttttaacttacagaatatttgatttatatcccataaacaataatgttgaaatatttaggcatggagaaattcaaatgtcacatgactaatgggttaatcatagagttaagaaattctgacacagcagattatcaacaaagttgtttaaaactaagttttattgaaaatattttttcatacaatttttttctgataatgatttcctctcctatatctccttccctagtctcctcactttcatatccatctaactcttctttctctctcttcagaaaaccactaggcaattaaaaaacatttaagcaaatgcaaaattaaaacgaataaaaaacagaaaaacaaacagaaaaaagaaaaaagcagaagaaacacacacacacacaaaacactcataaaaaaacaaaattgggaacgataacatattagcaaaatactagccaggtagaaaaaaatgaaggattgtgaaactaaaattctctaaaagttccattgattaataatggaataatttgtgttggaataattgctggaaatgggatctccttttactatgattcagatgcccagctgacactccattgcagaaaactaatttttcttttgcaagaatttgaccttgacaatagtttctgagttaggaatggggactggtgtccaatttgagtctcagctctaagacccccatctagagtggacttatgcaggctttttgtatttttgtgtgagttcatatgttcatcagtctttctgtgtctggaaagttctgtttccttggtttcttctctctccactggatcttaatttttttctgtttccttttccccacatctcagagatatgaggggagtggtttgatgaagacatccaatttaggactaaatgttccaatgtctttctcttccatcacattgtggatgtgtaggtctctattttctcccatctactgcaggagaatcttgtcctatgatagctgagcaaatcacttatgtatgagtgtaacagaatgtaattgagtcattttattgccatgttcctttaggagaaaataggtatttgctttccccttgtctatctagtcacagattctttgccatcccagcattgatagcctcagattccattttatggagtggccttaaatccagtcagatggggttgattactgccatgatgtttgtgcctctagtgaatcagcatatcatgcagaaaggtcactttgtagattggaaggttttgtagctggcctggcatttaccgttctctcacaatagtttgcagaatacttcccactatcatgggtactagacattaggggtaaggcaccagcatgactttccatgttcaatgagatatgtaggtattgttttcagcaatagtgccttaccttcaatttgtagagagcaaccaatcatagcctttgcagtcacctgagttgtttgggggtttctctttgggggacttgcttgacccctggaaacttcacttggtggtaagaaccgtcctgacactttgtctcctctgttatttggtatttccatttagatatctttcatatgaatatatatttttaaagttttttctatagtaggcccttgtatgacccctcaagtgggccttagttctggctgtttctatcaatattccatcctttaccctcctgtcccctcatcatctctatttagtccactgattcagatatcccatgtgtctctccataatgttatagtctaaaatactttagggggtctcctggactggtcgtttaactaatacctaattctatggctatataaattgcattatgtctattgaagtctcaaatgtaaaatctgaatataataaatagagtatgtttggtttttggttgggggtggggtgttagttgctacattcaattttgcttgttttttattttatttttttagttccatctatttacctacaactttcatgatgttttctaatggctgagtaatattcaattgtgtaaatgtatcacattttcttgatccattcatctatggataggtatctatggtatttccaatttttagctattttgaatagaacagcaataaacacggatgagcaagtgtgtctgtagtgggttacagagtcctttggatatatgcccaagagtagtatacctggatgttgaggtagatatattctcattttcctcagaaaaggccacattgatttccacagtggcttttttaagttagcacactcatcagcaatggatattaaatatttctcttacttcaaagcctcttcatctttagctggcaagtgttttattgatattggccacatggattataaagagataaaatctaatagtacttttgacttgcattttacctaatgactaaaaatgttgaacatttatctaagtgtttctaaataaattttgttcttttgaaaagtcttagaactttcaaaggctaactttcagtagacaattctcgaactcttgattgccatttgattcaaaaagcataatagaaaataaaaaataatctcaggacttgtaactgacaggtgaacaatgagtctatattagggacattaaattattaaacatcacctgacagtggtgaatgtcatcctctccccatctcaaacacccaccataggtttcatgcaaaaaagagcaatgtttaactgactgtcaagttaaagccaacactaataggtaaaatacagtctttctttctcctttatcccaaaacgtcaaacaaattcctgtgtccaaaccttaggtgatcctgggttaaaaattgataaatacatgcctcaacaaaagctacagtgaacccaatcactggatagccagatttttgctctaaatccaaacttccctccatgctatcactctaaaaatctactgcttttcctaactttcacttgtttgaaagtgcaccttctcctctggtctggtctcctcagatctggtctcctcagatacggatagtatctgttcctcactgtacacaacttcaatcaaagtccatggtggtattccaggactcctatagcatgacttcatttacatgtagaatctttctaaaggatatttttgaggtaggaagtagaaagctcattactggggcttctgtgtggagatataaatactaactgcatggaacagagtatcagaaaatagaattagtagattttcaaaatcattgcagtttattctgtaaggacaagaaacacatcattgaatattattaaagccaaaatatttaaccagttctttggtatataatggatatgtggtaattaattaatgaatgcaagtaaattcaggaagtttggtgtgaccagcactcaattgtatttcagtgtacttggcaatcttctaaatattacacatacagatccacatgcacatacagatggacatgtgcatgaacacacatggaggtatgtgtgcctgtgtgcatgcgtgtgcacacacacaaacacacccaaataatgaggtacatatgcactgatatgaccaactttgttttgacttctgtattcaacatatctattttagaatcagaaaataaaggcacccagagtatcttcttgttgtatcattcagtgaagacagaggaaattggcttgagcaactggctcatggtgtacatgatcatctaattgcacaatggcactgttcaatatccttttgaaaagttcagggagaaattggtgtttgtgcagtacaacaactcttctatgcaataccaatctttatagaactgaacaccataatgaaactagtcaaacacgagacaaatgaataaaaataactaacacaatgacaacaaaaatggccaaaaaatagatacacaaagcagaataaagcacaattaggtttaaaccacgagtcaagtcaataaacactgagcacatctatcctatagtccctgggactgtgcattcattcttctccctaatgtgactcctctatcagactttgtaactttactcccctgaagctgtaagttctgctatttcctttcagtattaatgttagaaaacaaacagaataacaaaggaaacataatgaatgacccagtttgccttcaattccataggaaggatcctggcaatctcctttaacattgtcttcttcctcctgcttctttttctttcgcaccttctcttcatccccactccttctcccagcttccttcccttctctgtgcatggtgtaattaattatccttgtctcatggggaagcactccctggcactctcagattaccttattgtcttttagaaggccccaatttctttctttttataaatatatatagtgtatgtttattatttttttatttaaaatcctttctttttcatattacatactaacctgagttccttctcctgcccccttgactcccacccttctcactcccctcccatccactcctctgaagggtaaggtcttccttggggagtcaacaaagtctagaatatcaagttgaggcaggacaaagcttctccccccatatcaagactgagcaagctatcccaccataagaagtgggctccaaaaagccagttcatgccctgggatagtcccaggtggcattgcctagtacttccccaacaatttaagtgcacataactgtcacccacatttagagggtcaagttcagttgcatgcaagttctctatctgtcagttcacattccatgaggtcccactatctagggtcagctctcttcctggttttccccatcatggtctggacccccacccccttgttcatatgatgactcctccttctcctaaattgaattccaggagctcagccaaatgcttggctgtggatctctgcatccctcatgtagtttctatgatgacaattagggtagtcacagaaggccccatttctaagtatgcccacagtccagagtcaacaagtatctacaacatcaaattatttctgggaggcacttttcagactacaacttggttttaattgtaggcagggtgagttatttggacttataatcttcattgagactcataggttcactttcccttacacatccatcatcactgtgaagatgaccattcaagtaacagcatgtgtaggcctgaacttcttagggcatatatttacccacactgcagctacaaaaaaacctgttatcttttcctctctgcagagttatcactggatttttaaaaggaaattgatgagctaatagatttggtaatctaatttatttgtggcctcctgtgtctatacatattgtaaagcagcatggaacaaatgaactggtttattttcctgtatttttaacttggtaagaagcacataagaatgggaaccatagtgaagagccaggctgaattccatgcatagtcatgctgcgcatgtattttactgttatttctttaaaatttagcccagtattgggttgagggactcacatgatctggtttaagtacctggactgacatcatttactggcagaagaatacttagatcttcatgagcatcaacagcttcagtttttaaaagagaaaattatgtatgaaacattcatgagagttttgtgagaaaaaaaactcttaggtagagggaaaactggagaaatttagtggggaaaaaagtaccaggtgaaactaatttgaaattaaaaaattaatgactattcttagactttcatatttttttctgggctggggacatgtttgctgggggaaatacttctgcgtatgtttataaataaagtacttgcttggccaatgtgacagcaggttaggctggactaggagtcaaagaggattctgggaaatgtagtagagaaatggtgttccagacaggaagtgacatagcaaggagactcatatttaagaagaggaaaaaggaagtgtcgctctctttcccctcggctcctgctccaacggcacgatgtgatccaccagctaggagggacgccaataaggcgtctgataagataagtcttataaaatatatagatgtatgataattgatactgagctaacagatgagaatcctagtcattggccaagcagcattgtaactaatacaagtctctctgtgtattcatttgggcctaacttgggcaggtggctggcgtaaagcttacacgtggcagtggggctcagcggcttttggcagaaagatttattgtaacacatctttctatggggaaagtgtttgctatgcaagaatgatgactggagtgtggatttctagagtccttcaggcaggcctggtatcagggctgcaaacccagggtaagagacatgcattctccgaggcaaactgacttctgagactagtcaataggtaaaatttgaaggctcaggaagagataaaaatggagatgtcacataagaaacatgtgtcacctattccccattttcttgcatacacacagaaagccacattttgcccgcagatgtttcaacatgcatacacaccacacacctatagacacaaaaaatttcaaagtttttattaggaagtgcatatactttggaaaaatctaacaatgttgtgtaataaaataaggtaaagaatgaagagaggtctccctaatagatttctaggtacatgttttattctccaggaagtagtgttttgaaatgctaagtagagaaacaatgtatttaagtcattaatctcaattagcttcattttccatgagaaagttttttcacatgacctcacctgttcaaattaggcctaattactccctccaaaggatcttagttcaatttcctgcaaacttggagtagggacagtgtattttgtcccaaatacttcaaattgtaagaagttcatttaacatctctttcaggtaaatgcccctgatgagagctggtatcattgatctgcagcttagcttgtaatttgctacattctggcttatccacacatctttatcatagcattattctagctaaagttgtatattcagaggcccttcctgaagtatcaggacaacttcagttctaaatgaataattgtgaatgctttgtgacataaaataatgcttttgtatttctcaacccagtaatcctgacatctttctaacattcagtatttgtgtaccaagatctagacaaggggtgatcattaaattcttaaaatatcctggtaaaatctctctgtctctgtgtctgtctttctctccctttctctcctctctgtgtgttccccaacacaatgacttttagcattttaatctcaattttctcatacttaagtttaagattacactagtatataatactctatcagaatcctatggatgcttcatgtgagttcttactacagtgcttcttggaagaagttttcaagtagtctattttactattattgctatttggcaatgcaattttcttgatcaacacatagttgactttgccctgtgaatctcatcaggaagcctcatgaagtcctgagcacagagttcacaaacccacagaaaatgtcatcagatttttgagaaacagtgatgcctttcataattcagatgaaataaaaccacccctaatcagccaatgcctcttacttctttaagaaaaagcatggtggttctttgggtaatattaatagtttttctgctgagtccaacgagaaggtattctgctgagaaagtttgggggccttgttcaagtctatttccagcatctggtacctgctgcaaaggtatagaacagatgtctacatgtttcgtgaatagtttagatttcaatttcctaacagaatcctgatattgaagttagacacattgccaacagatttagaaggagttagactcattaagataagacctagattgcagcacaaagtcttctcatgttaagattattagtgtgttcttccctgagacagggcagtattccaaatgtctatattccccacagcaaataaagtctcatgatgaatttaatgcccttctctcacttactgtaatagcaagaaaacatatcaccccacaaaagataccttctctgaaccccacaaacttcaaataggatgcccagtcagaggcactctgcagatgtaattgaagttggagaattggaaacagaaagtttcccacttgcccaaacataataacattatcctttaaaatctaaaagctttcattatctgttaagccagcataaaggatgcagaagaaagatgagagagatttgaagccagggaagttcttgaagtattgctagagcttggaagagaaagaggaagaatgggagaagaaggataagaaggaaacatgagccaaagaatgaggtggcatctgagagtatggggattgtttttaaacacctaggataaggaaggcctggtcttgcaaccacatgagaatgatttctgtctgtaccacagaagtctgaaaagggttcattagcagagtatctagaataacagacctacatgttactataaatctttccaccaaaagctgcctgagacccaccaccacatgtgaactttactttatgccagccgcccgcccaagttaggcccaaatgaatgcacagaaacatgtattaggtataatgctgcttggccaatgactaggattctcttctgttagctcagtcttaactatcataaacatatgttttataggacttatcggacaccttatttgcgtccctccttgctggtggatcacatcatgccgctggagcaggagcggaggggaaaagagggcccttcctgtttctccttgcttaaatgagtctccttgctatgtcacttcctgcctggaacagcacttctctaccacatttcccagaatctactttgacttccagtcctgtctaacttcctgtctctttggccaaatagtattttatttaacaatcaataagataaatatacacagtacattccccatcatgttttatttaatttcctcattatgaaacctggagattaacagtggggtgattccctgcccacactgcaggctgcacactggtagactggaaatggatgctagcttccacagacaatctgtggtcacttggtatcataacaagagattccgtatacttacatccatttcctacttttctaactccttgattctgtaatgtgtgaagtgtttgagatgtgccatctgaacatacaccaaactgggctattgattagctcaaaaaacatactcaagcagacccagctctctgaagagtcattttgtctgcatccccagagctagtaggtcattctaattcttctaggagaatgcctttccaaatcaaggctagaaatagccatcatttcaagaaggtgatagttggagctccttgagcccaaataaaatgactcaacccttgtcttctggagtttgtgcattatccagaatgtatctctaaggatcatttccagagttgactaccacggtctaataatctgtttatcttataattctcctttgatttaatttaaaagtgaaatctagttaatttgtatccaatttataatgaaagactgaaatttttagataaagtaaggacaagactaggaattttagtaatcactacaacaaaagatttaaagttcagtttctatatagaaaaaataaatatttgtggtaaaaacaaacacaaaataaaaagaagcacaaatactcagattctgctttattacacatttacatattatattcagaaataacattgaagataaagaatttataattttaatttaaaaatatttactgtggccttcccttaaatgcttcttggaaaaaatagaaagcacaaaatagtgtgaagaaaataatgaggaaccactaagaacactttcagtgttacatgatgccaatgacagtcagtctctaagacacacaacaggttttgaaaacacagggagcacacttgctcattcctattgactaagagagatcacagagtatataatgctgcttgaggggcaatgacccaaagcaagatcaaagaggaggaaatgaagtgatgttatccacccccaaggttattagagcacttaacttaatcaaagatgaatagaacaacaggaggaaaaattagacataagagggattgcaaatggcaaattctactgacaacaagcataaatgactgccaacattgtggtcaaccattctccttgatcttctgaagggagggcatggacagtgtcaagaatatttcacatactgattatggtcatagttactgatctgtgttctgagtgaaccccatcaaaagatgttttatgtattatgttatatgtaaggggtgtattaccatagcttcttgaaaatagaagctgttcacaggacagtcttctgtatctcataattataatactggatgctttgagaaattttgttacattgaaaacattacaatgttaaaatctattttaccatacttgtattgattttactttcctcattagacatagagctccattctcattgttgtttcttttttcctggtaactttagtttcactctgactctaaaatacctgtgctcttagcagttttatgatattgtgaggttatcatatgttatttaatgtatctttggcatgtacaaattaacatatctgaaaattccataggatttggaaacatgtcttcctgtgaagtaacagtcctacattttcaatatgtccttatgtctgcctttatctgttctattgacaaaacttttatttgaattgcttattggtttggtctctctatgtcttatacttatttgtgagacattgagaatcctttgtaatatgacatttaagttgtattttttctggacagtgttctgttttccttgaaattttgtttagattggcttgattgttgtacttttattcatttaaaatttaagaggccttatgtctactggcttgtatctcaatagccccatttatgggactagaatgagtcctgcaaaggctgactttctgggattttcatatttatgaatgctgggaaatttcacataccagtctctgttctctgatggaccccaaggaattgtgtcatcatcattcacaatttatttgtacaaagatttgaatagatagatctgcttgtggagctgaatgccccatgcctgacattcctcaaagtctcctcagctgccttctaagagtcttctttctgatccaagtgtatccattgctgttggcccagctatgtccctagagtgtttggcaaactgttcagaggatgaagaaaaatgaatatgtttccacaagatcttttccttactcttaaatcaaaaccctgtttcttggtgcctaaatagagtacatgattttgatcaaaagtgactcatattttgttttaagatcatgtgttgtgagatagtcatactaactctttaatttgtcatgtccagtcattgtttatgagtctttttaattctatatcagtatttattgtcctatttggtacttaggcattcaggggcacagttctacttgtctcactgaagtaatgatctactctgctgtgcagtagaacttattagagattctgtagtgggacactagctcatttcaagtagtgcttggacattgtgcataatttaaggaagtcaagcatttctcacactcttgccataggaaaccatccttagcattttcccatctgtcatagatttatgttatttttctcattcaggtgactaaattgatgacaagaagcaagtaaaggagacataaaattttaggggatttaaatctggcatgatggagagagcaggtcagcagattgaggtcactattaatctctatacatgccagtcagtaagcagagaacaaacagaaagtggggcctagtatcaaaccagtcctcaatgacccacttcttctaagaatgctccacctgttagagataacacaaagtgtcaaatgaacaccagcccttggataccaaatattcacattcaggaaaccattgaggatatttcatattcaaaacacaatattctctattatgtacatttattaggctagtacttatctatcacccatcaagcatctatcatctatctgttcatcaattataaaatctatttatccatctttcacccatatattatttctttgttagcagcaaatgggattgcattccgtcctccagcctaaagggcatttcccacgagcttcaaaccatcctctctgtatcctttccagaacaaatttaaagattaaataggaaaggtcttagaattggctgcccatctgtttttgctaataaacttttattggcatgaggttatgtccatttgcataatgttgtctgtaaatggttactacaatagtggactgaatagtattgatacatactttaagttaacaagtttaatgcagttgctgcctgtggaaatattcctaaacttcttttttcactttggattcctttgatacctacaataattgcaaaagacagaatctgtgcactacagaatcagataatcatactcatatttgtagtaatgaatgaactccatgcaacatctaatcaagatccaaaaatgataagactagatttaaaatgggtaagagagccatgacatttggttatggaaaatactttagaggtaaagatatagatgggtcaagtataaacacaaatacaacaaattcacacaagcagcatccaaaaaaagaatgattataaagatattttcttttaacaagttatcattcatatctacaaagtaaaacctgatagaaatgatgacaaaatgggcaaatcaatttaaatggtgagaacagttacagggaatccaacaggcatttctgaaatctgtgcataccctcatatatggcatttttgtcatatacaaacacacacacacatgtaattaccttaccacaataaataaaaaataaatataaaatatttttaaaaagaaaaatgattcagataatattttctctgttgtcctgtactaaacactgcccacatcagccatgaacaatactaagcattttctttctgtttcattccttgaaggttttattggggctgttcaattttcttccatatattctaccactcacgtctatggtttaggctctgtcagtgaaatgtgatctaaaggcagatgaagctaagaagtatgctgggaccagatgatggctgagaataatgagtctcacatgtgtcagatacaggttataagtactttcttttactggctacagggaatggtgtggctaaaactgggagcagtaaagagaaagtaacatttctcttacacaaagttccaaataatatttagtgaaatgcaattttcaatgtccacgaaatgcttcttttacagatctcttttaattttattatcatcatcattattgtatgatatgtaagtggtgtatatacatgatcatgtgtgtttatatgtatgcatgtacatacagatgactgtggatatcaaaagtcaagtcaatcactctccaatctagtttctgagacagggtctctaaccgaacttattgctcactatttacgtaggctgactacagaaggattctcctgactccattttcccagaagtgggattttaacaacacaccactgtgctcaactttcataggagtgttgatggtccagttcaggtcttcataccttctcatcaagcaattatgaaagttagcatccttttcagtcattctttttcaaatttgttagggtgtaagtgacatgctattaatttcaaatgatcaacttgtagcaacagttgattagtgatgacatatacatacatacactaaaccatcattgaaatcatcatgatcaaattacagagaatctcaacatcagaatggctctcattttctaaaatcaggtacaagacaaggttgcccattctctcaatatctcttcaatatggtacttgaagttctatcaagagcaataagaaaacaaaaggagatgaaggggatacaaattccaaaagaagtcaaactttcactatttgtagatgatatgatagttcacataagtgacccgaaaaatactaccagggaagtcctacagctgaaaacactttcagcaaagtagcaggaaacaagatttacaaaatctatagccctactatatatagacaataaagggggtgagagaaaatcagaaaaataccactctttataatagccacaaacaacataatatatcttggggataaccctaacaaaacaattgaaagacttgtatgacaagaactttgagtctttaaagaaataaattaaagaagataccagaaaatggaaagacctcccatgctcttagataggatcaacataataaaaatggcaatcttaccaaaagcaatctacagattcaatgcaacccccatgaaaataccagcagaattcttcacaaaccatggaagaacaatactcaactttatatggaaaaacaacaggacaatgaaaacaaccctgtacaatagtgtccagaggcatcaccatcccagacttcaagctctacaatagagcaatagtaatgaaaacagcttggtattcacacacaaaaaaagacagatagacaaatggaatccattttaaagccctaatgttaatccacacacctacaaacactggatatttgacaaagaagctaaagttatacaatggaaaaaagaaagcatcttcagcaaatggtgctggtataaatggatgctgccatgtagaacactgcagacagatccatatctattttcatgcacaaaacttaagtagaaatggatcagagacctcaacataaatcagaacactgaccatcttagaagagatagtaggaggtacccttgaaagaagtggtacaggagaccacttcctgaacataacaccagtagcacagacgctgagttcgacaattaataaatgtgacctcctgaaactgagacgcttatgtaaggtaaagaacacaggtaacaagacaaaatgggaggacccagaatgggaaaagatctccaccaaacctacatttgacagagggctgatttccaaaatttacaaagaactcataaagctagtcatcaaaacaccaaataatccaattagaaagtggggtatggaactaaatagaaacttctcaatggaggaatctaaaatggctgaaagaaattgctcaacattcttagccatcagggaaatgcaaatcaaaacaattctgatataccatcttataactgtcagaatggctaaaatctaaaacacaaaagacagtttatgctggaaaggacatggagaaaggggaacactgcttcactgctggtggaagtgccaactcatacagtcactttgaaaatcagtatggcagatcctcaagaaaatgggaatcaaatgggaatcagtctacttcaaaatgcagcaattcccagggagactgagttcttctatgggagaggggtcttcagagtctgtcctattttggggataaggcctaggccctgccccatatatctagcctgagggattatccctctatgtgaaatgggctccgaaagtccattcctatgctatgaataagtactgatcccatagattgtaccatgaataagtactggccccatagatttctgaggcctcctcaatgacaacaacattcatggggtctggatcagttccatgctagttgcccaatgatcggtttgggggccaacagctcccacttgttcaggtcagctgtttctgtgagtttcaccaggctgctgtggacccctttcttttttataactcccccttctctgcaactggattccagttcagttcagggtttagttgctggtatctgcttctacttccatcagctactggatgaaggttacaggatggcatataagttagtcatcaatcttattatcataggggggctcctctgttgcatagatggttagttggtgtcatccttgtagatctctggacatttccttagtgcctgatttctctttaaacctatagtggctccctctctgatggtatcccttattttgctctcatatattctttccttatacaacatccctcttcctttatctcctcctctttgctccttctcattcttattgtggagctccctctccacaaccccattctcccagttttctcgggagatcttgtccctttccacttctctgggggatcactcatgtctcccttagagtcctccttgttgcctaacttttctaatggtatggattgtagggtggtaatcctttgctctatgtgtaaaatccatatatgagtaactgcataccatgtttgtttttgtgactgggttacctcactaagaatggtttcttctagttccatccatttgcctgaaaatttcaagattccattgtttttccccgctgactggtactccattgtgtaaatgtaccacattttctgtatccatttttcagttgaggggcatctaggttactttcaggttctggctactacaaataatgctgctatggaaatagttgaacagatgtctttgatgtatgaatgtgcatcttttggttatatgcctaagaatgggattgctagatcttgtggtagagtgatcccattttactcaggaattgccatactgattttcaaagtggctgcaaaagtttacactcccaccagaagtggagtgttcccctttctccacatgctctccaggataagttatccttagtggttttttttttttattttagccattctgacaggagtaagatggtatctcagaggtgttttgatttgcatttcactgatggctaagggtgttaagcactttcacatgtgtctttcagccactttatattcctctgttgaaattctctatttagttctgtaccccacttttttattggattatttggttctttgaaaactagcttcttaagttctttgtaagtattggagatcattcctctgtcagatatggggttggtgaatatactttcccattctatgggctgccattttgtcttgctgactgtgtcctttgccttacagaagcttctcagtttcaggaggtcctaattactaattgtcaacttcattgtctgtgctacatgcttaatgttcaagaaattgtcctataccaaatctttcaactgtacttcccactttctcttctaagaggttcagtgtggctggatttatgttgaggtctttcatccatttggatttaagttttgtgcatggtgatataattggatctatctgcagtcttccacatgcctgcatccagttataccaggaccatttgttaaagatcttcttctaattccattatatatctttagcttctttgacaaaaatcaggtgcttgtaggaatgtgagttaatagcaatgttttcaattcaattccattggtctacctgcctaatttttttgcaaataccaagctgttttaaggactataactctataatagagtttaatgtcagggatggtgatccctccagaagttcccctattgtacagagatgttttggctattgtgggtctttttttctccatataatgttgaatattattctttcaagttctgtgaagaattctgctgggattttgatggggattgcatttgagtctgtagactgtgtttgtaaagtttgtcatttttactatgttgaccctacctttcaaagagcatgggagttctattaattttctggtgtcttctttaatttctttctttaaagactcaaacttcttgctatacaggtctttcacttgtttgattagtgttaccccaagatactttatgttgtttttggctattgtaaagggtgatatttctctgatcactttctcatccctcttatagtctatatatagtaggcctactaatgttttttaagttaatcttgtttcttgccactttgctgaatgtgtttataaactgaaggagctccttggtattgtttttcaggtaacttatgtaaacaatcatatcatctcctaacagtgaaaatttgaattctttccaatttgtattcccttgatctccttttgttgtcttattgttctatctaaaacttcaagtacaatattgaagagatatagagagagtggacagccttgtcttatttctgattttaaaggaatcacatgaatttctctccatttagtttgatgtgggctattgccttactgtattctttcctggacctttatcttgaagggtgtttgattttatcaatggcttttcaagcatctagtgagatgatcatgtggattttcttctttagtttgtttatatggtggactacattgatcaagattcgagttaaaaaggaacaacctctcgatgaggacaaatgacaggtattctactaagatatatcttataaactaaatagaaacctcccaagggaaagggaaatgttttgcttttatcttcacagaaattctcatcttcaaaaggcaaacgacactacatgggtagatacttaaacaaaagcaacgtgccatatggtaaactttacagctgtctctcaaaaaactctatttctctttatttcctagttcatattcaactaaaccaatgctagatttagaggtggatttggctttcctcctcaaaaatccaagcacgttatttaactaaactttatcttttctgtattgtatcaagaagccaattgatataatacagaataaaagaagaatttggggactgtttttgtcttttcttggatatttctctcaaggtgtacaccactcataattgttatgctctcatggttgcattccccagcatgtgtacctaacaagcaaacatttctctgctaactgtttatgtttgagtctcacacagccaatgaagacttgcctgaaagcaagcccttgacaccctggaaaaaaatgggccacacctccttgactgcactagatacaacttgctccatttcaactgacactcaggccagagcttcgggtactgacttcaatcaagttgatgatttcaagagatatccatctagcatggacaggatacaatccattcaagactttcactatactaacattttcttcctacaggactccacaaggctgtcattgtcccatttcatcaggaagtaacttggaggatgctacgctcccttcccccattgttgtcacttaggtaacacattatctagtgtcaggaatggggatctgatatgtgtaatgtatataggattacttctgtttctgatagttgtctttaattctaaaaacagagaagttaattctgtatcatcaggaagaaattctttagtctcaatgtgtaacacgactctctctgtatactgagaatcagtaaatatcgattaagaggttctgtaaaatccataagtatgatgcgaattgcatataattctgccttctgtacagatgtatatggtatccaaagtttttcttctcctgtagaaaccaatgtaaaacccctaccccaatgtaacacatgtcctggttttcatacagaggttagtacatctttgaagtatactggctgattgagttcagcagttttttccgtagtccagtgtctttctatagttgtttgtcctttttcattggcattaagaaagtttagtgttaataaagcattatgtaacctatgtttggggggtttagtcttccaagcttgtttgttgagcatctctttaagtgttctattagatctctgaaccattgtttgtcatgtaggattgtgtggtataccggtaacatgttttatgttacagtatttgaaaaatttttccaattttgtagagacatatgctggagcattgtcagtttttatttgtgcaggtatacagataactgccatcaccactagcaggtgtacaataacagaatcagctttttcagagttaagagcagtagcccattggaaccctgagaatgtgtctttggtatgatacacatatttcaaatttccaaactctgtaaagtgaaagacatccatctgccaaacctcatttctctgaatacccttaggattacaacatgctagcaatggagtttgattataaaaggaacaagtaggacagtttcttactatctccttggcttcttgcctttcaaacctttgctatttacatgatgtttcttatgaaattttgaggattctagcacatttccaattaataaacaatcaatctcatcattgccttgtgctagtgggcctgggatctaataggatctaatatgtgtaatgtatataggattacttctgtttctgatagtttcctgtaattgtaaaaacagagaagttaattctgtattatcaggaacaaattctgtagtctcaatgtgtaacacgactctctctgtatattgagaatagctctacgtcttcctgaccatgcccttgcaagcatggtcaggcatatctgtagccagcccctaagtaggtgtggctacagcttcccctacaattccccttttagtctaaaagaggattaaaacttaacagtgtaaagtatccaaaattaacaatcataaagataaaatataagaagatacaacaagctgcttatgtcacatcctaactatttatgttaactaaactctaaagtcgtctaagagaggtatccaagcctgaacacctccttccaatcccaaccataaacannnnnnnnnnnnnnnnnnnnnnnnnnnnnnnnnnnnnnnnnnnnnnnnnnnnnnnnnnnnnnnnnnnnnnnnnnnnnnnnnnnnnnnnnnnnnnnnnnnnnnnnnnnnnnnnnnnnnnnnnnnnnnnnnngtggaagaatccagactgtcttttttatgaatttaattctgtcagtttggggatagttgttgttaattgttccccaaaagtcagtaagagctatttgccaattttcattatccttccataaggaggaaattactttattagttaaaggtactataatttctgctggatcttttccagtcagctgacgaagtcttaatttatcaaatcagaaatcttttctatatatgtctttaactttttattctgtttatgtggcagaaatatccattccaatatagtgtcttccctttgtatcagaatttaagaaaggtattctccggatgacaagataaccagaatacagtctaaatcaatgttcattctatctacatgtgtatctaatattctgttttctactcattgtaactcttcttctgcctcagcataatatacttggactgtttaggtacttatcacctttaagggtcatttttaaatgctttaagtcatgtccttctacaccaataattgtctgtaattgannnnnnnnnnctgtaattgagaaatttcccctaataatttctgaagagaatgaagagtttgataacgatctctcctaatttgtaacttttgagggctgattctctgtaagtctatcttgtaacctaaatagttaatagaatctcctctttgtatcttttctggggcaatctgtaatccccaacgaggcagaacttccttcatcatttcaaacatatgttccaaagtttccttattagaatctgataaaagaatgtcatccatgtaatgataaacaagagattgtgaaaattttcttacaaattattcccaaaggttgctgtacaaagtgttgacacaaagtagggctatttagcattccttggtgcaaaactctccattgatatctcctaacaggctgtgaattattaagagttggtacagtaaatgcaaatttttctccatcattttcctataactgtattgtgaagaaacagtcttttagatcaatgactatgataggccatcctttaggtatcaaggaagtctatggcattccatgatgcagagagcccattggttgaattaccttatttatggctctcaggtctgtcagcattctccacttacctgacttcttattgataacaaatacaggagaattccaaggactgatagattcctctatatatccagcctatagctgttcctgtactaacttttctaaagcctctagcttctcagaggtcaaaggccattgtcatacccaaactggttcatctgtaagccacttccatggcagggcctttggctcctcagaaggtccatcatttgtacctagtttctgtacagcatggatggttggtaaccgttttccaaagcatcttaccagatcttttctactatctaaagattgtacataatttgtatctgacagcggaggaatattaatctcagtattccattgctgtaagagatcacgaccccagagatttatagctatatctgccacatatggtttcattatccctttctgttcttcagtccaatgcagaccatcgagttaacactctgtcaaactttagatagagttccaattcctaaaaattgtacatttgtctctctaagaggtcatttctgaggccaagacttttaagtaatacaagttacatacgcccaagtgtctactaagccagaaataactttattattaattttcactttcaactgaggccttttatcattaatagaagcttgccaaaatatgtgtttctcattttgtccattcacacttgattcttcatcactcactgctcaagctaccatctagaggagtatcatttttcacaataggcaaaggactatctattgttcctgtgagagactgtctcccactgctactgggaatgagccgacctttctcgatgtgggggccttcctgagtcccccctcagggtttcccgaccttaatggctttccttgtatgtccctggtcgatctacattcattggtccagtgtctacccttaccacatcttctacacaatccagaatgcagtggccttctgtatgaggcattgttagaattcgttttcgaaaatgtctattagtatgtcctattttaccatctaggttcctggagcctttgtggtgtccaggggaaggctctttctacccaaggttctagtttatagcagtagtaacctctagcctcttggtacctatgttgacctctataaggtgcttctccttgcctagcccttatatcctcacctctagagcatttaatttcctgttgtcgttttaaacctttggggatggcttctcctacccaagctccagtatcttgcacattatagtcaatgttggctgcatccaaaacccatttttctagcagagctgatatgatctttaaaggcaaaagtattcttttgtatattgggtttgtattttccttttctaccacggtagttgggtacactaatggtgtacgagtaacaaccttagaagaatagtcataatacctgggattggagtgattctgcttttgaggcatcccaatgatctttaagcctagtaatgatatccttttgaaaagtttgaatctccttaaacataaaagattccaagcatgttagtgaatctgtaaattgttctaactgctcatttacatgttttcctaggtctttaatacgatcatccttaggcaacaactggatggcatggaaactgccttctaggtattagagcctggattcgaggtcatgatttgttgattttgagtcctcagcaatcgaccgcatggacctatgtaatctatcagccctgtactgtaaattatcttccaaacattcaaatctagactcaaatttctgatctgctaccttgaatgctttaataattgattgaatggcattgtccaattctttaacgctatgctggttattttgtaccattgtatctagttgctgggtaacattgcctatctgactttctagctggctacatatattctttagctcatcatggtcttctgacagcctagcctctaaggcctcagacatggaggatctctctgtgtttatcttatcataaatatgctgtatctcaccagacagctctctctttagtgtattggacacagagccaagcttattatccaatttctgttctacttgctgcacaattgtggcctgactaatctgttgtccaaaacctcattgcataaagctgttatttcctgcaagcaggtggtgaggttatctttgttcctgttcctgacgactctggctaggaatgtcattgtagcagcaagctaagtgccatgactgcatataagccagtaaatgacagattagcatcctcctcaaacagtgaattcacgtaataagcaaaaatattaccaattttagcaaacaataaatattccgccataattttacctgatttctactccagatgcagtaagtatctttgaccagtggatggcacaggggtttagttagtttgcagcgtttggcagcagtcggtcagcagtggagagaggtcatataagcagctgtgcttatcttagagagtatatggctttatggctgtaaccagtgaaatagatgctgctttaccacagcagcggccaggggaagcctctgctgaaagctgaggcctactcacctctaggcagctagaaactgtctccgagctgggtggatggttctgagaaactcagctgcagcaggtcggcttctagccgggagcacctgtgaagagagggacctttccctgccaaggccgcaggccctggtggacccacagcttgtcccaaatggtgtgtaggtttccaatatcccacttcttacaccagatatagtgggaaattaccaatatggagtcaggtagaaatataagggtatttaatagggaaaagccttacttacagaacaacctagcaggagtcatggcagtggaatgcacacaagcccaaaagtaaaaccgaaatcgagaccgcagtcccatgcaagtatcgcactatgtcatcgtgaccacgcccttgcaagcatggtcaggcgtatctgtagccagcccctaagtaggcgtggctacagcttcccctacacataactgccatcacctctagcagctgtgtaataacagaatcagctttttcagagttaagagcagtagcccattggaaccctgagactgtgtctatagtattatgcacatatttcaaatttccaaattctgctaagagaaagacatccatctgccaaaactcatttctctgaatgcccttaggattacaacctgctggcaatggagcttgattgtaaaaggaacaagtaggccccttttcactatctccttggcttgttgccaagtgatggagaagtcctttttccaacatttgctatttacttgatgtttcttatgaaattctgaggcttctagcacacttccaattaataaacaatcaatctcatcattgccttgtgctagtggaccaggcagactcgtatgggatctgatatgtgtaggattacttctatttctgattgtttcctgtaattgtataaacagttaagttaattctgtgttatcaggaatgatttctgcagtctcaatgtgtaataccactctttctccatattgagaatcagtaactatattaagagtttctgtaaaatccaagagtaccatgagaattgcatataaatctgccatatgtacagatgtatatggactttgaactactttacattcctcacttgctttataacctgccttacctgatttgttggtaccagtgtagaaggtaagaactccagaaatgggagtttgtcttacaatatatgcaaaaatccagactgtttattttatgaatttaattctgtcagtttggggatagttattgctaatcgttcccaaaaagtcagtaagaactattgccgatatccattatccatccacaagtaggaaatttcctcataagttataggtactaaaatttctgctggatcttttccagtcagatgacagattcttaatttggcctttaaaatcaaatcagatatattttctatatatgtcttttacttttttttgtttatgtggcagaaatatccactccaatatagtgtcttccctatgcatcagaagcccagaagggtattctctggatggcaagattactagaatacagtctaaattaaggtttatcctatctacatgtgcatccactattctgttttctacccattgtaattatttttctggctcagcagataatattctcagactgtttaggttcctttcacctttaaatgctttaagtcatgtccttctacaccaataattatctgtaattgacaaatttcccctaataatttctgaagagaattaagagtttgataatgatcccttccaatttgtaacttttgaggtctggttttttgtaagtctattttgtaacctaaatagttaatagaatctcctctttgtatcttttctggggcaacctgtaacccccaatgaggcagaacttccttcaccatttcaaacatacattccatagtttcctttttgaaatctgataaaagaatatcatccatgtaatgataaatgagggattgtgaaaataaagtcttttagatcaatgactatgataggccatcctttaggtatcaaggaagtctatggcattccaggttgcagagggcccattggttgaattaccttatttatggctctcaggtctgtcagcattctccacttacatgacttctttttcagaacaaatactggagaattccaagggctggtagattcctatgtgtccagcctatagctgttcctatactaacttttctaaagcctctagcttctcagaggtcataggccattgtcatacccaaacaggttcatctgtaagccacttccatggcagagcctttggctcctctgaaggtccatcatttgtacttagtttttgtacacactggttggttggtaactgttttccataacatcttaccagatcttttctgccatctaaagattgtacataattagtatctgtcagtggaggaatatgaatctgattattccattgctgtaagagatcacgaccccagaaatgtattactatatctgccacatatggtttcagtctccctttctgtccttgtggtccaatgcagaccaccgagttaacactctgtcgaactctggatagtgttccaattccaaaaatattgtacattcacctctctaagaggctattgctgaggccaagacttttgggcaataatagtcacatccactccagtgtccactaagccagtaataactttattgttaattttcactttcaactgaagtcttttatcattaataaaagtttgccaaaatatgtgtttctcattttgtccagtcacatttgattcttcaccactagccaaacaagcatctagagcagtatcatttttcacaataggcaaaaaactatcgattcatcctctgagagattgtcttccactgctactgggaatgaccggacttttctcgatatgggggccttcttgagtgctacctcggagtttcccagccttaataggtttccttgcatgtccctgctcgatatacactcattggtccagtgtctgcccttaccacatcttctacacaatccaaaaggcagtggccttcaatatgagacattgttagaatttgtttgtctacaatttctattgatatgttccattctaccacagctgaaacatctaggtttctggtaccttcatggtctcctggggaaggctcttcctacccaaggttctggtttatagtagtagtaacctctagcctattggtacctatgttgacctctataaggtgattcccaagcacttgagtccacacctctagaacatttaatctcctgttgcctttttaaacctttccacatggcttctgctacccaagctccagtatcttgcacattatagtcaatgttggctgcatacaaaatccattcttctagcagagctgatctgatctttaaaggcaaaattattctttttcatattgggtttgcattttcataaactattgtatatataattgattgtcttgtttctggatctgttacctgtaattctactgccctagttaacctttgtacgaagtcctgaaactgttctataggtccctgttttattctggtattggcttgttgccaagtgatggagaagtcctttttccaacatttgctatttacttgatgtttcttatgaaattctgaggcttctagcacacttccaattaataaacaatcaatctcatcattgccttgtgctagtggaccaggcagactcgtatgggatctgatatgtgtaggattacttctatttctgattgtttcctgtaattgtataaacagttaagttaattctgtgttatcaggaatgatttctgcagtctcaatgtgtaataccactctttctccatattgagaatcagtaactatattaagagtttctgtaaaatccaagagtaccatgagaattgcatataaatctgccatatgtacagatgtatatggactttgaactactttacattcctcacttgctttataacctgccttacctgatttgttggtaccagtgtagaaggtaagaactatttctaccatggtagcttgagtagactaaaggtgtacgagtaacaaccttagaggaatagccatgacacctgggtggagtaggtgcctcggattgcagtgattctgcctctgtggcatcccaatgatctttaagcctattaatgatatccttgtgaaaagcttcaatttcctgcatcataaaagattccaagcatgttagcaaatctgtaaattgctctaactgctcttctacacgtttttctatatctttaatatggttgtccttagacagcatctggatggtatggaacctgccttctaggtattggagtctagatttcaggtcatgatttgctgattttgaatcctcagcaattgaccatatggacctatctaatctgtcagctctgttctgtaaattatcttccaaacatccaaacctagattcaattttgtgatctgctaccttagatgcttcagtaactgattgaatggtattgtccaattcttcaaccctctccgggtgttttgcaactttgcatctattttctggctcacagagcctatctctgtttctagacggctacagctattctttagtctgtcacagtcctcaaacaggccagcctctaacacctcatacatcgaggatctctctgtgtttatcttatcataaatatgctgcatctcatcttgggtaacagacagctctgtctctagtgtattggacacagagccaagcttattatccaatttttgttaaacttgctgcacaattgtggcctgacctaatctgttctccaaaacctcattgcataaagctgttatttccttcaagcaggtggtgaggttatctttgttcctgttcctgaggactctggctaggaatgttattgtagcagcaagctaagtgccatgactgcatataagccagattagtgtcctcctcaaatactgaattcttgtaataagcaaaaatattaccaattttagcaaacaataaatattccaccatgatttttcctgatttctaatccagatgcagtaactatctttgaccagtaggtggtgcaggtgctcagttagtctgtgtggcatttggcagtggttggtcaggcaagattgtggctgcagtggagagaggtcacaaaggcagctgtgcttagcttcgagagtgtactgccttgcggctgcaaccactcaatgaggcacagctttatggctgctgtgcggaccctgttgaaagccaaggcctactcggcttatgggcaggaggcctcctggcacaggtaggcggcagtctgtgcccgtcccatacacgcagctagaaactgtgacagtaaccatgaggaggcctgtggaagtctcacacctgggcagacggttctgagcagctcagtggcagcagggatgcacttgtgtggtgcaacaggtctgtgtggcgcagctgggagcacctgtggagagagggtcctttcccagcctagggcgctgccccagtggaacccacaggctgttcgaaatggggcctatgtttacaatatccctctcctgacaaccagataatgtagaaaattatcaatatggagccaggtaaaaatacaatttttaattttataggggaaatttaataggggaaagccttacttacatagcgacctagtcagctggtggggcagcagtatgtacaggaagccaaagatcaaagcgaaagcaccccaccacataagtgtccctcactttagattaccctgaccatgcccttacaggcatggtcaggcatacctgtaaccagcccctaaggagacatggctacaacatcccctacagtggtgtctgtttctttccttgtatgtatggattctaggtcctgttccagtggttgcaagggggtctgatactctgatgggtctcaatgtgggtacaggcaagtctagggcacttgctgtccaggtggttgggagcaggactagcacagagatgtcatcagactcttggttgcttcgttctcaggggccaagtcgacctgcatgcagatcccaggatggaagttcccagagtgggctggcagaagttggacccaaggcaagaaccaaatcagctcacttctgccctgagtgggggctggagtagcccagtcattcagcagactcagggttgcatggtcctcaggggccgagttgacctgcctccagtaacacttttctgtcacacattttgacctaacaacagtctcaaaattcctcaatatcctcaaatattttgttactttttagggttgatttttttctacagaatgtaaatacagacttttatttctgaacatttatactcttgggaagattttcaagcctttgcaaacacataggaaactcgtaactgaagtatctttatgtgccaaaactttccaagttgtattctttgatgatatactttcttttcataccttggccaacacttcttataatcagtgctttaaattttagtcagtagttggatatggttttagtttgatatttgctggtattaatcgttacttaaaatttgttaattggttagtatattcactcattcatgtctttaataatttaagagatacttacatatttagttatattattgtttgttctaggatttcaacaaactatttcaagaaaattctcagttttatttcagatgtcaagcttgttggaatgaatttgtttataattttcagtctttcaaagtaatttgatttcccagagttattgcttgtgatctcttccatttctgaaatcctagtatgtattttctttttataatcagcagaactaggagtttcctgacattgggaactcactaaaatgtcacttttttcctctgcttaatctctttctatttattttgtatcatgtttaatttctgctccaaatttttgtttttccattattactttcacatttttgtgcttattttccccattcttttgtagcctaagattcaaacctgagttgagacttcagttttcttccctaatataaatattttatactgtaatttccctcttgatactttgtattttataactttaatatacttaaactttaagttatttttccaatccccttgtgacttcattttgatctatgaattatttaatacgtcttctgtaacttagtattttaaagaaacttagtaattaactataattttattttgttttcatttgatatttataattttccttgccttcagactttttcataggtggccacatacccttctccagtgaaaatatcacataaaatggaaagaaagatgtattaagttattttggattgagtttcctttaaaagccaattaggccaaggtgacttattctgtttatcttgttaggaccacagagacaaacagcttacacaaatgacattcacttctcacacctttgcatgctggggtcggggggcaatcagaacatggagtcagaacagttggtctgctgaatgcaatagatttcctttagagaagcccatcttctccttgtgtctatgcagggtgaagcagagataatttctcgcctgctttagtaattccctcatggacaccctaccctcataacatcctataaatataattatgtacgaaattatccatatgcatattcaatcatacagaaggttttgtatttttactgtgaagtttggtagaggacacaaacattcaatttataaaaggagagatcataactctgtattttagtgatgttacagaacaatttctacttctacatcatttgatatctttacacattgtactttgaatttcacttgttagtgaagatatttaagatagttttagtctttctgatgaatcaattttcattattgagaaatctctctctagtttttgatagattctttgtcaagaagcttactttatttgatatcaaaatatgacttcatgtattttgtaattggttagaatatattgagtttgaagcccacatgcccatccctataacagtaaacaaagagcagaaaaacaagacatactcccactgtgaaaatctgaagactgagaaatccatagccattgttaagagtagcttatgagtatataaacttgcataatttgatgatactctatgacttttttgtggagtgatatgaaaaccattgatttaccccagatagggcactattaacagtaaaagaaaagattccaacaagtctagtgtagtgaactgattggagttacctacagaagtacatgatgataaaagttagtgaatagatgaaaagcccattccagggatgattcacaaaacctgaacttctgctgtcccctacatgtcaagggggaagtgctacagttttgaaaatctcctctccctagaaactaatgctgcttattagcctggagtagagtgggtgccttgtgaaacctgtaaatttaatcctattcctcagtcctgtatgttttatttacttcctgagtcttaaagagaaaccttcctaaagagactttttcaatcagaaaaaaaaaagctgtgtagcaaacaacttactctgtgcagtttctttccttatcttcttgcctcagtcttccacatgataggataacagaaatgtaacattatgcccagtgaactcatgacaattttttcaagatatgttgcctggggagttggagcctagatctataacaccatgagaatgagaagctccgtgtcacctgtggttttcatctccacctattgcatgcttgggagacttttaatatttacaatttagggatattggattattaatgacaactaaaatatgagcaaaaggaagtgaaacacatgccaaaaaccaaaaatgatattatctatgttttgaaacaacatgaatgtatccctactgaattctgtacttaaaaaagaagcagtttgtctgctagtcaaccaggctgcaagattctcccaaccattgtggcctggctcacttccttctcttgccaactccttacatactctgctgggacctgtccactgatgtggatgcctcctggaaataaaatatggtggacaacttattttcagagctagtgatagaaacaggcatcatacaaaatgactatagcatttccactggtttggaacaattttcattttcattacagaaataaattatgttacatatcctgaattatacttaaaagcatatgtgtttgtcatggagatatagtacatttaaaaagacaggaaaaaatgttgggggctggcatagaacatcctttaaaaattattaattttactttatgccaccaggggaaagaactcttgagatttccatttatttagtctctacttttatagtgattttatatgcatatatactattagtttaaattttggctttttatatgggctaaaggggtcccattgatatattacagtcaattgttgtcagcactgaagggaaggatgtaattatatcactagatccaagataaatgataaatgggtgtttattgaggaacaattacacagaaaaatacaaagaaccacatgagcatttctctgctcttcctcgcagatccactgacccaccagaaagagtgacctgcttcaagctcctctctttctgcttccatcagcctaaatccacacccaaagaggtgtagtcactgttagaggtccacaggccagatgtctacaaagcactatttgttaatatctggaacctgatagtatgaccttatggctgaagacaggatatactagtatcatcaaatatagagaaactgagctggagcctaaccaaaagttttgtctttgcagactatcattcattgtgctgtaaggtatttgtgcatgctacttaaggagaaaaataatcatcagtttcatacaactacaaacccagcatgcaacacttgggacccgtatgcaaaatatactgatacaaatagttgcatgcaaaacactttttgatctgatttcatttaaatttacatgacatagaacccacacctgacactattaatgaggtaatgaatttgaaactaggtaggtcatgggttctagggggaaatctatttcttttattctattaaagaaacacggtgataaaataactcctattgatatataggagtttctatgactatagatccatttatcattcaaccctagtcagagaagtttcttcttgcaatcgatggtgattaacagagactaacaactgggcaacatacagagagtgagagcccttggatcacacatctttaaatgcaatatttttatcacaaccatccctcatgactcaaagttctctgtagaagaagaaatataaagactgtaagtaccacaggtagtgggtgactccaaagaaatgacattttccagacaacaggtctgatgtatacatgaattcacagagactgagagcgagaacaagttgataaagtcccaatatggagaagggagagagtagggacttgttgaagtaaaattaccatacacaagatagggatgacatggttaattttattggggagaaatcatttacatgagaaatagataacccagggtcagtgttcccaagcatccaaactcagctgctctctaaaacctgaccagaacagagagagagagagagacagagacagagacagagagacagagacagagacagagacaggcagagagagagagagagagacagatagagagagagacagagagagcctgtcctcccctcaggcctaaatcccacaagccctgtaagctcctgtggccaagcccaaacaggtgtggtcaatgccacaggtacctagtaagatctctccctacagggacttagagccatcactgaccaaaagctgtttgctattgatatctgctggcaaagggaaaattagttttatccaatggagatgcactggatatatcaaccatactgaagagcaggcctcatctttttatttttggtggaaacacaaagaacgtaaagttgattggtttgggtaaggatctgacaagaattgttagagaggaaacaatataaaaaatattttgtgtgaaaatttttaaacaataaaaactagaaaaatggctaacatgttttgtcatatacatacatatatacatatgcaaacacagatatatatgcatatgaatacaaatttgttttgccaagtgtggtacagaagctgattatctgagatcatctaaattatcattgcaagcatcttgagcacctgacattagaaggagtaagaactgtcagtgctgtcagtgatcatactatttactacaatatttcctaataaaattatccaccagatactattaaatgtaaaaatgtgtgagcatttaaagctgatgtccccatcagtagttaccttgggatgagtaacacacatagtacagtgaacttgggtagaaaagcctactagacatggtatctctaattggtcacaaaagatgaacagaaaatggctacagtgtagtccatcttgtaaattttggacaacatacataatgtgtttatattcccaaagtacagaaattaattcattcttccagttgatttgttgagattatagagactgtgtttggtgtgtcgttaaaaaaggaaaatgcaaggccaaaacttttaacataacatggtactgaaatgaaatatattcccttatttcttcacttttatgctgtttattttattaatttagagaaaaatacttgtagcttgtttactatgtcttagactatcatattttgattttttaaatttcagctacactgaagccatttgatattttactatctttgcaaaaactaaagagatttataatggacttgcagtcctggcaccctttctggttatgggaaaactggtctctttcctgactcacatctatggaacagacatcaatagatggaaataattcgttgcattcattttccattttagttcattttgaaccagggggacaatctggccaaccataacaaacaagccaggcctgtggccaattagaaacactgaggattcttttgtgttattggaatcttaccgtgatgccttcttctggattgaatgtctcaattactttgtttagtttcacggaactgtctttgttcatatcttatcaaactgcttatttctccaaaatgaaattgagaggattactacctccatcatgatagtgccagaatggctctcaactagaaaaccaaattaaataactgaactgactgcctcaaatactgaacatcacaacagataaagcaggtttgtggttcccgagggaagtaaacaaatgaagtatgagctctcattgtccatagtcatttcctagaggcagtttggagtcacagagcaaaagcgacagtcaacactggctgtctcaatgaatatgggagatcactggatgctgagagagccaaacagttcaattttgatatgagcactggggtgaagagaaaagactttcactgagagcttcagagatctttgcggagggaggatattcatttctagccattgtctgcatactgatctgaggggtgtgaaatgaaattgctcactgctgggaaagaaacacaagaaaccagaaatacaccagatcattccaatagttcatgcagtgccaggaatagttatcaagtccttccacccacctttcagaatagaaagacttcattgtattatggcagaagagtggagacttgagagagagagatttggaaattggtaaacgcttgggtaacaagatgacactgagcaaaggtacttggcagcaatccttccgatttgagttttaactgacatgtgtcctcttatctggacatgtacactggggtgtccatgcacatatgcacacacacacacacacacacacacacacacacacacacacacacacactattaattatgcaattaattaaataatcaaaaagtaactatacaaaatcgaattagcagaaaagactaaatgtgtttcccaacctggatttcacacagcaaaaacacacgcacaaagaaagcctctgaaatactaacgtgagagaagtggtcactatttcaatgtcctagaaagattcttgcagctagaggctccacacttctgagccatgctcttggctcatgttactagcccactcctggtttgggagttttctccctttcttagtaattggcatctatttctatgtctatttatgtttttgatccaagactgcctggaacacaaaagcctggaaaattgtcaggtgtttaaggacctttaacactatgtgagtagattcttcaatgtgttcactctcgctatggggttaaattcactctgtgataaattctgcttcatacctactcttacaaggaaaactttagtttgagcaaacttcaattcacttaagtatgatttcaattaagttaaatgagcattaaatggtacctttagtcccaggtcccaggaatggcaatatctagacatccaggagccactcagagcatattatgtgaactaagtagagctaagtgcaggatagactttcaggaaataccataaagtgtagtttcctgtgagtttctgaaaatgtaacataatttaacaaatagtttaatatgccttagtgcatattgtattttatgggcaaatgcttagtagtaatactagaataaagcattatgagcaaattacaggagataaaatgaaaatccgtttaaatagaagaaagtaaaagagaggctaggatataacaataaacagaaatggaaaacaaataataagattgttgagataaaactaatcaagtctagagaaaataaaatttccaataatttatgaatatcattaccagacatttccagatccacaaaaccaaactaagaaagcattttcagaataggtgaataaagcacattctcaacacaagaagagtaaatgtttctgggctgggaatatgctcagtgcagtgagttgctcaagtcatcgaatacaggtcagaagcagaattaagattctgatatcccacatagcagactgaaagactgggggatcacatataactccagaaatgagaaaactgagacagaatgctgcatagctaatctagcctaaactaaaaatttctgaattcagagagaggcttcagtaaatgatggagggagaaacccattgttaactttgggcttatatacacatgtacagaaattggcatgcataacccaaaaacatatgcactcaatcatttgtgaacatgcttaaacatatgaatgtataccatgcccatatgcaaaaataataaaaataagtgcagcaataataatgaaagaatggcaggcaagcaacatgagttttatacgtgccatgggaaaggtttgaagggagggtatctgattggagcttgaaagagaaaaggaaggagggaaagtcataggattctatttaaattaaaacatattaacaacaaaataaaagaatggtaaatatttatagcatgaaaatgatataattttatgtcaactaaaacatattaacaacagaaataaaagaatagtaaatatttaaaccatgaaaagaagtatcccacacaataagaatatatattttacataattttagattatattaaatatatttacatattgatacataatgaacacattagtatgtatataaatacatgtaaataaacctttatgaactacatatattatgccgggcattggtggcgaatgcctttaatcacagcactcaggaggcagaggcaggaagatctctgtaagttcgagaccaacctggtctacaagagctagttccaggatagactccaaagccacagagaaacactgcctggaaaaaatagacaagaatgtaggcattaaaaatgaaataaaatcaagtctactaagagaagcatctagtaaataatcagctgaggctgtcatcattatttagcaattacagtttcacatagctgcaatgtaacacagatgacaaaatcccagccaggtgtaacacatgttcgaatgcactaactgacatttaaagaaagtcatatttccacatcatagctggatactctagcatacctctaaggtgacagagaatccccacaccctgctgtatgtttataacatacttctaagacaatagagaaaacagtatctcattggagacaaagacagcaaaattaattcacttaaccaatatggcatatatgtacattctttgaagtgaaaccaaacacacttttttatgtgaacaaagaagatgcataaaaagtgactgtgttcattacctttttgcttttatgaccaagtacatggcaaaaagcaatttctggaaggaggatcatgctttgaatcaatgtttgaaagaatgcagtccctcatggaagagaaggcatgagtgtaggagagaaggccctaatgattttgtgcctccaatgaggaagcagaggtggaaaataagtagagcttggtgatcaaaccactagccttgcccctgtgatttatttccttttggaggataatgctgcttgcaggttccatcctcttccaaaagagtaccatcagctgggacaccaacatgtgtgtatgtgggagacattgcacactcaaatcacaacagcgaccacatagcaaatctatgctcataaagtctggttttgtaaactttcagatatcagaattcagagtaacttctctgaattgaaatagaaaataataacaaaccatagaatttatttcccctccaagttactaacttggctgtgcataagctcacaggtcagtgtagataactcactgcatgtatttgtactaaaataatagtggaaatacatgaaaagctttagataggaatcaactttttcaaagattgtacatgttaaacatccaatctctcctgctgattccaactaagaacccaaggggaaaaagaaacaaaagctagctgtatgaggtttgtgaaagataaatcagagcagcagatggcaaagctgaatcaacagtgggagaggtataagaatatctgaaatgttatctatctgaggaacgctttctttctgaatgttatacaaagaaaaaaaataaaatcacagttgtctgagaaaataccatcaggtagcaatatttatttacaatagatttctgtgactcaacttgtatttgtaagagcatcatgtactctctctctctctctctctctctctctctctctctctctctctctctctctcttaaggtcatatgacacgtgggagagaaagccaaacagaagcgttctctaatttatgtgaggtggcacactactcatttatagggggctgttaacaaactcattattatgtaatagtatcttataatcattaaaatattaaataaaatactgatgaattggtcgtgaaatattactgaaacacctcctaaaattactaaacttctcacaatttacagcttataacatgtttctcgatagcagttagcatcaaaatgaaactaatatcacataaggaatccaaaagttgtcaagaaaagaaagatatgtgaaagtaaaataagtaataccgtcataaataaaattatgaaaattaaaactatgacaatacagttcaaaagccaatttttagcttgctttcttgaacactatttgtatgcagtcacctactaaaatgaatgtatcataaagagtgataaaaaacaacaagtttctgttttgtgtaaaagataaaatttaaacaaaaataggttgagaataaatatacagaaacaaatattgtagagtaagtgtatagaaataaatggttttgttaacaatggatagtagatttcaaatctatgtttagatagacaattagtcaagatggatagagtaattgctaatgtttaaagagttacagcattaggaaaaaacagatttataataaaaatccttaataataatagaaaattaaaataaatgaagtttaaaaatagggataatttaattatcatattaagaaatttaatgcattctctcactaataaaaaaacactcaaaaatcaacaaatctggtgagacttttaacaacactaaatttggttttgctcttattgatatttttagatcattgctttcaaaattcacagaacaaacattcttccaaacagacatagaaaattgatacatgtccagaccatgtcaagccaaccaacaagctttgatgaaaactaagagttacgattacctagtgtatgctttcttaacaagaggacctaaaaatgaatttgattaaaagagaaaaaaagtacactgagaaccacaaacactttgtcccaagcagtgtcctggggtgttttacattgttaatattgctattgtgttgggaatatattttggtggggtgttagtaagaaaactagtctaatggtttaattcaaatgtgctagtttcagtttgtataatgacaattcaataaagctatgttttataaataaaaaatcacaggctttatatggcctagagtttcatcttagagttaggaagggattgatctaaaactcttaactttagatgtgagtaacccatcatgcctgacttcattgtgttgagacctctgagagtggcaagacctttcagttggaaacagttagccaaggctttgggtttagacttactgagtttaggttcccttcaagacttgaccactgataaaggacataagtgtttgaagttgtttcccaaaatgttataaatgagatatgaacagagtgtgtatcaaatatcagtaaatggattaaccattgtaggatttgtagatagagaagtagctggaactacataaaatatgcttattatcccatatgcaatacactgcttggcagtatgtttctgtctgttaccatagcaaagtcatttcctctttgagatcagtgtgcttgctttttgatagagcaatggtttaatagaggtgataccattgttagggctaagattcctgaaccttcttccctgtcaaacatatagggagagtccaaatacctatctgtctcacatttatctatctctatatctatatatcatctatcatttaatctattgtctattatctattttgtgtctacctatcatgtatctaaaatctatttatttcccatctacctttctattatctatctatatcatctatccattcattatgtttatctatgtgaacctattaactatctctgtcatctatgtgtctctcatctctcatctatttctataggtggggctaggaaacaaggagaattctgggaaaggagaattcagtggagccagccagagagttgttatgtagaccacaaaagagtaagatgtccagacccttctccagtaagataagaccacatggaaatacatagattaatagaaaagagttaataactaagacagaactagccaataagaagccctagtcatcaactgacagtttaataattaatattattttttgtgtttatttgggtctgaaaaaaggatggcagacaagagcagcaattacctagctatgtatcatttatctatcagcatccacctattctgtgtataccgttgtacaggagaaccctggttggtaaagactattttataaacccatctactaaagcgctaaagcacatgcctatgctggcacttgcacatgtatatgcactgagccaatgtattcacctacatcttctaaatacatttctgtgagcaaacttcctttagaagttttatttcaacctatgtgtttcacagtaatcccttctttttgaataccaaagtgctttaagataatagaccccaagaattgaggataatcagaaacaaacaccacatttgatctggtaattatacctagattctagtaaattatacagtgtggtgttttaagttaagaatattcccccataagcttatacattaaaatacttagccttcagggggtggcactaattagaaggattaagaggtgtggccttattgtagtaggtgtggctttgccaaaagaaagggttcactggggtgcattttgagattttaaaatctgaagccaggcagactgtcactttctcttcctactgtctgtgaatccagatgtagaattctcagctacttctgcagcaccatgtctgcctgcatgcaattgcattcacttccatgaagtaaacttccgattctataagccttggtcatggtatctcttcacaacaataagatactgactgggagagtgcctgtattatgaagaaagactatagccaatgacccactatatgaagatgatagccataaactatcaactaatttgaatggagaagactcattatttattctgtgtagacaacatttctgacaggaagaaacagcatgttaccatagatgtgaacacactaggaagatatattggtatttttaaactggaaatccctagccagtttctcttcttggctttggcttatttttaataggattcatttcattcttggtgacacaatgcnnnnnnnnnnagatgtttccgtgtctgggaggcaatcacttatcaaataaattaaattcctactcattttctgtacaacagctcaaaagcatgagcatctgtgccttgggattccaagggactttattacaaatcagaacaggaaaccttttaactatatgcaatacattttgttgaacactaaaatatttaaattatgatagggttcctttcagctataaaacacttaaggatatattaggaataaacaaatgtctctcatttcaattatcagttacatattgagcttttttttccatcaagaaaaaagcaaattccttatattatttcaactttgatttcctctgcctctgaagatcactggagcaagctaaacactatgatgtgtgctactaggctatttccttacatgcataatacaatatataatataggtgcatcagttattggttgtaaagaaaagcaagtacaggattgttttatgatagttgttagggctaattgtttactccaaacccacaaatgagcagctaccatacagtgaggctttgctacatcaagagagagatacattatcacctacattacagatggaggggttctgctcttgggatatatgctattagaattaaaaaacaaaacttcttgatgtcattgcaggagcacaattgagtatgagacagctggtatgctctcttgtttcgtgtgcttttgttcaatcgactgcatagggaaacaaaggtagctaccgtttattaaatcagaaatacacaagatcttggatgtgtgccaaaaagcagaaaggaccagtggcctggctccaaaacagcaaaggaagtaagatgcatcaggtatgcaaccttatgtatgtaatttgcatagtgctttcctctcccatattcctatacaggaaattttttccatcaggctccctttcttgagtgatgcctcagcaagcttcatcctgcacccaggtctctgtatttctatctcagtgtggtgttgggagatttatgtagcactcccttttctctctatctcaagttgctcatggtcccccggagaaggggaaaggggcaagatctcctgagcaaattgggagaatggaggaggggagggggaactaggagaatgagaaggggggaagaggatggatgaggaggatatgggagcaggaaggttttgtaaggggaagaatagtggacagcaaaataagagataccatgaaagagggaaccagtataggtttaaagcgatatcaggcactagggaaatgtacagagttctaaaaggataataccaactaaccatctaagcaacaatggagaggctacctaaaatgccctcccctgataatgagattgataactaacttatataccatcctagagccttcatcaagcagctgatagaaatagaaacagatacccacagctaaaaactgaactgaactttaatccagttgcagagaaggaagagtgatgagcaaaggtgtcaagaccaggctagtgaaacccatagaaataactgacctgaacaagagggagcccttggctcccagactgatcagtggaaaagcagcatgggactgatccagaccccatgaatatgagtgtcagtaaggaggctttagaaatctacagagcctcttgtagtagatcagtaatttgcatagtataggaatggactttgggatcccatttcacatagagggatacactctcagctgagacacacgggggatggcctaggccctacctcaaaggatatgatagactctgaagactccccatgcaaggcctccctctccctagagagcagaaatggtattggataagtagggtgtttgtagtgggcaggggaggaagggagtgagagagaatggggattgacatgtaaaacaatcttgtttctaatatagattaaaaaattaattaattaattaattaattaaaaaagaaagtttccaccaggtggcttaatttccttcagggaaatttgagcttttgctggtgttagaaatttgctggttatcttgttttgtgctctgtctcctcccttccatgcttgtttcagaagggtatagcttagttagctacattccaagttttacttgtttgagcttaactcaagtgtcatcaaaccaagacaataagagggacatattggcaggattacttcagggccagggtctgtaacatctttcctgttagctttaaaacttgtggtccatgttcacaattattcttttctttgtttgtcagaaacacttgctacactgttagtcttacttgtataaacagaaaatataatattattcattgataaggacagttaaagtcaaaactaagccctaaatggatgcaagccataacaagcgaatgtggggctaaatcttggtttaaaaccacattctggtctttcaattctaattattcatagatgtttccgtgtctggatatgtcttcctgaactatttgttttaatggtggtgagttagacactataaatatatgtgtttgtgtgtgctggtttgttattctcctggctggaggccttttgctctgccctgatggattcatggggggtgcatatataagcaaaagcttccagaggggatctctggaagcttttgtttgtccacatgcttgacaaagaggaattgacagcacagaccagaatgagtcctgggatgcagcgccctctagtggtgaagttctcacgtgggccttgcaattgcaacccttagctccccttttgttataggccctataaaccaaggatgccatgattgcttaggcctaggaagcagcttgtattgtagtttatgtacagggttacctgtcactgtgattttccaggttttcaaagggaccagtgttatatctcctgatctgcagtgtttgaggctctcggctttgaagtcttgacagttttctggaagcctttctacaaggtgctttgtagtttctcttctctggctttagcttgccctgactcttcagcctcagctctctgttcttcctccttccactacccctcttgcttctgccctgcacctcctgtctatttgtgaagctatttagccttcagctgtcaagcagtcactttgcacttttgtagcttggccttgctgatgactcagttgtggctaacgcttcacaccagcccagcatgcactgctagatgtacaagaagagatcctttgtagaagcctttgattgcaaaaccaaacgggtcagcccccaaaactgacttctaccacaggaccatgagcctggtcatagagccagaaaagaattgttaccacgtgcctcacatgcaaatgaaggctcctgttgcaccagtcaccatcagagctcttgcaatagtaactgcagtctttcttttaagtctcccagtggtctacatgggaatgcttgcagagtcatctgccgtttcttacaattacaggaggatggtgatagcaaaaatcccgggacagacaatttaaaacggtcctcgctatgtctgcaccttcgggatctgggaaaaccagctaaaactttatgtagttttcatttcaaggtttctgtaagagttaagaatgctaatgctggctaaaggaagcccatctggctttcggtttactcttctttccctcccaaaaaaagcagaagtggaaaaagagagaccacaatatgccaacttgagaaccaaattgcctaatctcagtgccattctgttggtggaagcataagcaacaggagcactcacagtgagagcagagggatttagcagcaatgaggattttctttgacagatttaaactgcctttaaaatcttttcattatgccagnnnnnnnnnnnnnnnnnnnnnnnnnnnnnnnnnnagagcatctctctcctgaactacccatccccactttcaagcaggagaatcagctgaggttttcccagcctgggaactttccacttcaacaggacttagctttctcaacaagttagcaaagtaactcgactttaccaaggcacagagggcaaatatgtgtcattgtaacagtcttgctaaggggtcagaggtcattatggcagtcatgcaacaggccaggggactctttgacagtcttaactgatgaaggtttttttcctggtttatatgccatgaattcaaataacatttttgttcagtgtcatgctacttttactaagattaaggaaacctctcaactataggacttgctcagtcaaaatcctggaaagatacataccagtaatctatgctgtttgttttatgtctctggaagatgaatgaactgacattcaagttgctgtcagctttatttttctagactattcacctaccttaccagataacactttctgactcaggagttgtgaaggagctagaaaatggctttgtgatttttttctggttgctcatgggcttttcttctactatttcattttatttttttccagacagggtctctctatatagcccaggccagacttgcaactgtacacctgcctcagcatcccataagctaatagtaccaaccaagcaggcttgtctctgcttataaaacttgaaagaattatctcagaacataatggcaaagctttgtctagtatcaacaatggacatatctgttggatgttttatatgcgaatgttttaaccacaatcccatgtgaaaaaatgaggtagatttctgagtgtagtgtgacaaattagtgcagacatgggacaaaattccctcagactttccatctatatgggatacttcactctctgtgaaacactacaaatcaaagcttgacttggggatgacctggaatactatgttactgaatctttgatatattcaagtgctaatgacatcatagtcaacagaacatatttcataccagtattttagccacaatcattctgtcatgactttgtctagctcaattacctaactggaaaatgttgaaatagcatccactttcccattcttcttcagtcactaagtgaggactatccccttgagaatgtggcctagaaacaggcctaaatgaagagagaaagcactgaatgccttgcaaattcatataaaatataattggtttaaggatataaaactgcagttggataagaggcatggactttgtgaagtcttgaggtctactgagagcatgataaatgtggttgataacaatatgctatattttaaaagttgttagtattctttaagtgttctcaaaacaaaaatgatgaatatgtgtgatataacatgttaattggtttaatttagccatgtcattgtgaacatactgtattgtgtatcataattgtgcatgactttatttatgagctaaatagatgaataaaaaaaaaggtactttgagagcccatcccacatgacgtggatgctctcatccaggattcatggggggagggcctaggcctggcccaggatgaggttgtggaatttggggagccccgtggagggctctaccctctattgggagtggagggtggaaggggatggtgggggattggaggggggagagggagtgaaattataatttgtaaaaattcaataaaaaattaaataaaaaaactctgaatgtgtaagccatccccaactaagtgttttcctttataagagatgccatggccactatttctcttcatggcaatagaaatcctaggacagtaacaaactcgtagacttgtctgttacagatttcatacagggttgaggtaggaagatccatcctaaaagttagtggtacattccaatggtacggaaactggaactgaaaaattaagtggcgagtagttcattattacatattacctttacatgtgaaatactaccatagtacaacattttgagcacttagtctctacctactggtgctttatgggggaaataaaggatacttggggatgcatgacctaactataagatattgatcactatgtgtctttgaaaactatgtgcagcctttggttcctttatctctttttgtttcaagtctgccattaaatgagcagttaatatcaaatgtgcacactaccacaatgtactgactttactacagacatagaaacatgaatccatttttaaataattccacaaggtagtatatactagcacaatgaaaacaatgactaaacacattcaatttcttaaataaatgaagtattttttcattaaaaatgaatgaacatgaagaactgaagccaatcattcacaaagccatcaccatatttctaaaaattatttttcatgaatcacattgtttaatatattattgttctgaagctagtacttagattacttttaagggaaccatatatatgtcagatagtacatctccatgaattaaacttttatgtaacaatatgaagtctccaaggttttatgacatactttcttccatgtaaatattttaaattcctttaactataaagttttataaaaattctagataagtggctgagaatttttgagggacagcaagtagactatggaagaaacaaaatctatttgtagtggggataaaaagatcctctaaagaatgctgtatagcaatgaatcccacagagagaattgaaatagatatctctggggcagaacagctcacatagccataggcaaaaattctgtgaatctatctgagcaggtctattttatgagagtggatgttgcctgagatttgtccttacttccaaatgtgcctaaattatatttcctttgtgttttcagtggaaattctccagagagaatagcagtgatttagaaatatatattggtctcattctgttttcatattttgtgagaatttactgtaattaatagaaaaattcaagtaccatgtcatcctaaatttacattcaaaacaaactaaaaacttttcgttttatgagttcttaactaatgtacacctcctgaaacccagaatttgataactgccacaaaatcgaaaaggaagtctcagttctgagtgctgcaattaaatggttgcctaatagtgaaggataaaaatgattgctttccagatattgtttcttctatattatttattctgagacacagtatcaaatattccagactagccttagacacactatgtaataaatgataatcttaaagttctcatctttctgtttgctaccaccaagttttgaactgagaactaaatgaccttatatacagttcatactttacatgaaatggaattcaaggcgttgtacatagtaagcaagctctttaccagtcaagctatatctccagtccctggatgctttatttcaaaccacatttttgcatcaaataaataatatatatgagatgtacatattatgtgtccatatgtaaagactactataccaaatacttagtatataagattaattttcattatttaatattttcattatttattataaaataatagatattataatatttgtaaaaaattgacaaagtagaataaccatctcttcataatcctaaaattttaaggtgataactgttaaaattgtaggaattatattttcaaatacttgatgaatttttatgtaaatgaaattatatttatacaatctttattattttattaatatcatattgtaatcatcatttgtactatttaaaaatgtttctaaacaatattaaatatctacataatatcttataaacactgcataagttttaagtattgctttagcattaacatggtgttggatctgtttaatgttgatgtgtgatttttttattcttgtttataataatgtataaaattttaaagacataccaatatattttaaaaaataaaaaaaacttgtaatattaacaaaaagctcagtcaattaaaaattacaatcatttaattattttttatgattaagcggtgggtcctttggataatattttcactaaagagtcagctatgcatctttcttagctctccatctgaacagggaatggatacatttcaaacagcttggactatattgcactaaacttcctctataaaatgttgtattatttaacaggctagtccatgatttagtccagggaggaggaaatttcccaattcttttgtgatccacattctggactgagtgttcaataactgtgttttagtttttgacctaagatatctttgatcacgaattcagtccaaagtcaaataatgaaataaagacaaagaaaactcttctatatttgatgaatatgctgtgatgtcagattgtaaagcattactttttgtgaattcctgtcttatttattacattttcatcagttatctaaaaatttcatatattgtgttttgatcctattaacctcctcccctcgccttcgaggttcagcttgtgaactttgtatccttattttaatttgtttgtgtgtttgtttgtttgttttgtaaatccatcaattctaatttgtgttacccatatacacttggatatgtggtcaacttaccagtgaatacactcttaaagaaagtatattatcctctcctgcatactattcattacttatatttcctcagataggggtggggctttatgtccactgtcatagtcatttctctattgctgtgaagagacagaatgaccacagaagttctttaatttttaatttatttaaaagtttttcattttacatatcaattaaatttccccctcccctcctgctgctcctccctccttcccaccatcagtcccccatccacttctctgtaagggggacctctcatggggagtcaacaaagtctggcatatcaagttgaggaaggaccaagcccataccccaccctgtatctcggctgagcaaggtagtccttgctacaattcataaaatcacacaactattatatcattaaataactcagaagaattaaggattcttctgatgagaaaaccagtacaaaagttgtatttggcattataatcttgtgaatgaagtggctatttcttgctttaggttcttcctgtgccttattcctttctgcaacaaacttgggatttacttcccatagttcagcattatctgatcatttactgagattaatttttcccatgcatttgtagtttgctgattagactccatagctatgtgtaaaacctgctccccattaacaagtgctagtttactgattacattccttagctatgtgtgagacctgtttctcactatcaggtacttgttcccctctccattgcaattgcagagatctgccttcttgcacttatctttattgacaggcatttgatcagtgtttagtgcataggcaaaaacattccatctaagacattcccagatattcaaggatttagaattattacacacccaaagttgatccatagctgtatagatggaccaaaaattcagtatgccctggttatacctcactggcagataaagaagcaataacctaaactaaccctgcactaaaaagattttcaaacttcttgttttattaactcaagattttagcttagagttttactgctccctcctatttgccctgagaagataaagacaaaggtaatcagtccatttgctctcctcaaggaaaggtaactttgctgaatgcctctgccacaactgaggccagagcactgcagtgcaccaggtgttttcttgtaggaattaaacttagagcctctctttgacttatagccctaaccaattgatgctaaaagtttctcctagcagttttagtttattgttctctatgtaaatcttatttgccttgctgaccttgagaaactcaaacctcacattctactgcaaaaaataattactgttgcaaatgtgtatgtataactttatccccaagaactggggagaaagagacagaagaacaaagagaaacaaaaagagaaagacagagaaagataaagaataattataaaggaacatgcagaagagcaattgtgtgtgtcgattccttttttccctcagtttttagttcctttgcttatttgtagttccttttttttcaacccagagcaaaatattttagatgcaaggcattttaaaaattttgataattcctccctggagaatgggctccaaaacagtccattcatgcacttggaataaatcctggtccccctgtcaatgaccccacagactgcccaagccacacaactgtcacccacattcaaagcgcctagtttagtcccatgcatgttccccagctctcagtccagagtcagtaagctcccactagctttggtcagctctctctgtgggtttccccatcacgatcttgatatcccttgcttatatcctccctcttccctctcttcaaatggactccaggagcttggccctgtgcttagctatggactctgcatctgtttccatcagttactggataatggttctatgatgacaattaggatggtaataaatctgattacagaagaaggccagttcacagcaactcctattaaggaaaacatttaaattggggacatgtgtacagtttcagaagcttggttatcatcatcatggcagggaacaggcagcaggattgcaaacatggtgctagagaagaatttgaaagctacttgcatcctgatccacaggcaaagggaagtgggggagagagagacagagacaaagacagacagagagagagaggggacagagacagagacagagagagaaaaagagagagaaaaagagagatactggatcttgtttgggttgttgaaacttcagagcacacccccagtgacacactgccccaaacaaggtcacacctcctggtccttgtattcctttcaaagagttccagcccctgattacaaagcattcaaatatatgatcctatggggacattcttattctaactaccatatccacatcctctttccacatgagtatttaataggtattgggcttgtgcatattttcccacccatgctgaagtcatatatgcagctatcctgttgtatccaggggacattatttactcgtagtctctgctcttatagtctttctgtcccttgggtgcagagtatgtggtaaagatatccattttgctttgagaatccatcagtctcatattctgtgtgctttgtcaagttgtgaatttatgttttaatcactgaacacttggaatagaagcttctctaatgatgactgagagttgcattgacctatgaatataaatataaatcaatagaagtgggcttggaattcatttaaaaaaagatagtagtacttttctgcctatgagtataatctgtctagccacagtttctcagaaaagcatgtgcatagagaaagagaaaaaaagtatctatttaagaagtcagtatacccaatgcctgtctgcaatgtattagcattgcatatgattggtacatacaaaacccatcaatgagatcatgcttaccgaagcatgattctcagattgcatggatgccataaatcacagtggatttgaaggtttatcactccttaataagcagtttggtttcatttcaagtgtttaggaaaccattataggttaaatgttggtgataacctaattgacttacagcttttaatttctattttcaacttcccattcttgcttttctttgatagttctatggttactaatgagtttaaggtggtcaacaagaatgagcattagggtaaagttaagggaagacccttcacaagtatatctgggttgagagacaggcaaagaaaccctaatatagtaaccacctcctggtatcttttttgacctactctcttaatgggcttccagggaaacatattgcctattgcattttgtttgttcatttttattttattttatttttcctgttattttttaagttcttctgagttggcctttcttttgtagaaattctcatccaggcacatcttcaatattccatttccccagggtgcaatatctaaattattctctcttctaaagcatgtctctttgctgagattacagtgcccatttttacctttatatttatgttagtcttgacatctttcagtttctgaaaagtaaaattcagtgtcaattttatgtcccatctgtttgtcttaaatgctcataaaatttatcataaattgggaagtcttaccagtggctacttttcaagtcactgcttaagtatagcctctttatcatcccccttctgtcatgaccagaaaggctttgctccgtgcttaagattttttacccactctagctttcagtcatggctcttgtcagcagcattgccattctcttatgtagcaggtttcataagaatcacatgtgtggaattttatagataggcacactactacctatactatttgtaaagcaaatcctaaaaatttatgattttatacatgtaaatattcttaaatgtatattatgaatatattgctattttagtatgttgatatattcttaatatgcttatatagtgaacaataaggagagcttaaatgaaaggcaaagttttgacaaccttttgatttaatgctaccagagcatgtattattatatggcaagaaatcaatgtacattgctacagggtaaacaatgcattgaatataaaagtctcttctgtatatataaataggaacataaacatataagtatcaaattgtaaagaagaatgtgtattgtatgatttttctcataaatctattacgtaaattgttaggataaaggatggagaccggcaagaaaggggatgtagtaggatattaggaaaatgaagggcaaataaatgtgtaacaaaatgataaatatgtatgaaaatatcattgtgaaacattattttgtatgctataaaattaacacaatatagttatgtttgtagcatgaagatagattattccatatactgggaaattttgagagaagcaagaatatttccatatttgtgtctatattcttaaactcttaaagttgaaaggcaaggaatggcaaaattatctgtgatctgggcatgacagaacatgctaaagtcaatgtagtcatgatgattaatcatatgctgatccaggattgattaactttccacaaactgtaaatatgaaggcttggaaaacaagacaggctttagattttaaaacttgaaaaataccataaaatcaagatggaataaatttttaattaaatgatccagtttgtaatacgttcaccagttgattgagatttttttcctttccatttatttcacttgattggcatgaaaatgtgtgtatggcacataaactattcaactctccataatcttctcattatgttaaaataaatcaagttattgtttgtttatagcttgtcatctttataaaaatattattacctccaccttttctctgaatataattaaatgaattatatacagagtattttacatacagtttgaatatcctgaggtcagtatactttgatgtgtgttactttgaaagttaacaaagaaggaagtcaagatatactgaggttagatactgtacatgtgaattttaacaagcactacagttttgataaaattaatctttaatgttttacagtgtttttatcacacagatgtcttaaatgaagtgtacttttttttttttttttggtttttccagacagggtttctctgtgtagctttggagcctatcctggcactcgctctggagaccaggctggccttgaactcactgagatcccttgcctctgcctcctgagtgtgagtgctgcgattaaaggcgtgagccacctacacccgtcctgaatgaagagtattttatggaacagaatttgacaataggaaacttacctttccttctcccagagactacttgatatttactgtcattgcatatagttttgtctcaagcctaaatcttcttctctagactaaagggggaattgtagtgatattttcaccctctgcacctgtagtactgaccatgcccttttgggtatgactggtcaaaggaataggagtggggctcaaagcctcttcaggtcacagaagcatcagtgtggcaaggtctgcatccttgaggctagagtggtgcatcagccacttgttccctatataagttcttttctccaattaaactccacttcattctactggtcaagcatcctgatttccatgcccttatcaatcactgttaaatgaatgatataaacattcaaatgaaaaaaatataatttgcagaaagaaccagaggcctcaggtgtttatatcaaaagtcatgaattggtaattcaaaaattaagatttcctaggtaactttttgaatactctttttcttgttaaaaatccctttctatatccattcattttcatatctaaagtgaatctctgcaaataagcacaaggcattattaggtgggagggaagtaatgcactcaatgtttaacaaagaaaggcctttttaaaattaagttaatgaatgctaacttgagtatttcccattaaccttccctattcccaaagtcccccatagttttcagctgtcactctgaatatgtctttcccaatgataacttgaatcacacttttggtagaatgccattctctctgacagtgaagagttggaaggcacatctcattaagagggtgaattccagagtgccaccagatatagcagacatccatcatatcatctgacaaaaataatacagagtataaccttgcatccatggaacaaaaatagtagtcttccatacatataaagacagaataagatagtatctttagaaagagaagctttaatctgaggtatgttatctgatcataaattagaaactggtaatttatagcacaatgtcaaacctgagcattcttttaaaaatatatgtaggggtgcttagttctaggaaccagcaggcaaacctaaggatgacttgaatctgattctcagtacccacatgtggaagtagaaaacaacatccacgggttgtcctctgatctccatttgcaaactgtgacacacaattatacacacacacacacacacacacacacactaaataattatgatacaatttagaaacaatattaaatttaaaggtgataattaaatattgcatgtatgcatataagctcattctatagaaaaaagccagaatttaacattttgatttgtgtaaatgaattttaaaaaaatagcaaatactcttcaaatgaatatgactgtcaaattatgttagggttctctacaggaacagtactcatcaaaagtgtgtgtgtgtgtgtgtgtgtgtgtgtgtgtgtgtgtgtgtgtgtgtgtgttagaagaatttattaaatcaccatatgttgaaataatcaatatacttgtttcacacctgagtggctgaaaacattgtcaaataccagtccaccaggatgaatgcctcagcagtcctaatctggaacagaaggcttttggaaaagcagctgacccctagtcaaagatggacatcataaaacattaattatcataccagtgacaaaaacagcaacagcagcaatggggaaaccatcttggggcaagagggaagagcaatgagcaaaagacaaataatcttccttctgtggtaccccttcctcatgggctcctgccagaaagttccacttgaatttggggtgggtcttcccatatcaactacagcaatcagaataaatctttgggtgagtctgcagactcagatgattctaatttgtaaaaagtcactattcaaaccagtcataacaggtaatgaaatcatacatggctaaatgcctctattattaaatatgatttctgtcacttacctctttaaatcacactttgcaattaacaacaattgttctcatgtaaatcagaatattgaaatttgtataagggctggcaagatggcccaggaggaaaaggcacttgctgctgggcctggatgcctagtctatccttatacaggataggagagcacactctctcaagtttgtcctcttaccttcatcccagttctattgcaagtattcctccagaacatacacaaaataaagacataaatataaaaaaatcattgactcgctggagaggtttgcataatgtctaatatgttttaacttcaaaactttagtaaagttaatgtatgatttgtttcctcataatcaaagtcattattcattggtcagttgcaggttttgaggagtgtccgtggagatgtgttcatgtgtgtgtatctggtacctttctcaattgtactctaacttgtctggtctctttttgtattttcccatgtttttgttattctttgtgaagacgtctctcactgaactggccagctagatccagaattccacctgacttggcagctagcatttccattgctgccattctggccagtgtttcacatgggatgtgcaggctgaattcaagttttataaagacggtttagttgttttcacagtttgctatctgtggtggacaaaggatcctgagctcttcatggcttaaagggcatgtaataaatgtccttggcctgacatcgcaactcctgcctcagagaacaatcatgttcactgtcattgttgccagcattgctgctttacacaacttattcattctgcttaaattgttacaataattggagccagggaaatccatgtaaaatgtgtgctccatattcagcaaaggggggattttgtgaaagggtatattttaaaactccaagaagatggcataatcttctcacttttaataatgtatctcttctattcagattcccaacaatgttgaaaaacatgttggaatatacagtcgatgaagtatattccagtatttatttgttgattgatattttatcattagtgtaaaatagatgtatgaattatttttcatatttgttacacagggttaaatattaaacagcttataaaaatgtaaatcatctccaatatctaagaaagctatttctcaacattcgaacacaccattcatactatttgtaggtatatcagtctgtctttgccagaggatacaagatagcataatactggattaaaacacaaaaatgttactctaaattgggtaactataaataagacaccattctgaggcttggtcatctaatctgttaagcacaatgatagtgtgactggtgactaaccctgtgctctgaaaatccttcatgatgctctataaaagagagcataacacagtatatgagaacaagaactgtgaagacaattttcaactgtggttccagccagaagagtaattaactgtgagattcccagccattacaaactgtgcattgtagggagtcaccctaaccccgcccaatagtcctggggcaggtaccaggtggacccaggactcgcccagaagggcgtggtgaaggaaagccaggatgacgtaaggcagcttcttaaggggctgcacatggggacgcgggcccctttgttctggccgcgctggctgggttcttaacctagctctggcctgtgtttcaccctgctgtcctctgaaataaagataccttaatccaatagtgcattgaattcccaatctgtagaattatctacttgcctacaccaaataaatatttacacatggatggaattgggatggatggctagtaaatagtaatgatgtatacatgtaatattcttaaccattaatagttgaattctacagaaactaacaattattgcttttttagcaaacatcatttaatataataagaatcaagtgacagctgctcacaggatccgaaatcggccggcaggctccagcacaaccagagactgccaaggcactggcaacagtcccaccaccatccacctacccatgagaagaggacagatatcagattattggaactgtttgcatctaccagaagggaaccttggtcccatacccaccagaagaggaagagactcccaccagaagaaaggatgggaagaagacaatataaaagcacattgaacaacagaaaaaaaatcaatgtgagaccaccagagactagtgaacatacaccaacaataccagaacatcacaatgcagatgaagcaaaagagaataatcttaaaaacttcttcatgaaaatactagagggcctcaaagaggatatgagaaaatcccttaaagtaatggaagaaaaagcaaaccaaaaaatacaagatatcaaaaattctttcaaggaaacactccaagatctaaaaaccaaaatagagagaataaagaaagcacaatctgagggaattctggaaatagaaaagcttgataaatgatcaggaactacagatgcaagcataaccaacaggatggaagagagaatctcaggagttgaagataaactaggagaaatagactcatcaaccaaataaactcttaagtccaacaaatccctaacacaaaatatccaggaaatatgggatactgtgaaaagaccaaacgtaagaattataggtatagaagaaggtgaaaaaacccaactcaaaggcccagaaaacatattcaacaaaatcatggaagaaaactttcccaacctaaagaaagacatgccaatgaaagtacaagaagcctatagaacaccaaatagcctggaccaaaaaaaaaaatccccatgacacattataatcaaaaccccaaacatacagaataaagagaaaatattaagagcagcaaaggaaaaagtcaagtaacatacaaaggcaaacctatcatcagaattacacctgacttttccatggaaacactgaaagccagactatgttggatagatattctacctacactaagagacaaagaatggcaacccagactactataaccatcaaaattttcaatcaatatagctagagaaaggaagatattctatgacaaaaccagattcaaacaatacatatccaccaatccagctctacagaaagttctggaaggaaaactgcaacccaaggaagctaactacaaccagaaaaatataggcaatagataatcccagtttaccaacacccaaagagaaaagggatggaaacccacacataatttcactaccaccaccaaatccaaaacaaacaagaatggaaaatcaatggtcattaataaccctcaatattgtcttatctcacccatgaaaagacacaggttagcagaatggataagaagacagaatccatcctgcttctgcatacaagaaacacacctcaacttcaaagacagagggtacctaagaattaaagattgggaaaagattttccaatcaaatgtatgcaagaaacaagtgggggtagcaatcctaatatccaacaatcaaataaacaatcaacaattaaaataaaatcagtcaaaagggatgagggagggacactttgaaagcaatggtaagaggaaagttcatagtgcaaaatgcccacatgaagaaacaggagaataatcacactagagaattaatagcacaacagaaagctaggagaacaatacaaagaatcaatgaaacaaagagttggtactttgagaagatcaacaagatagacaaacctttatccaaacttaccaaacagcagagggtgaacatgaaaattaatgaaatcaggaatgaaaatgtgaatacaacaacaggcctcaccctccctggagagcagaaatggtattggataggtagggttatagttggtgtgggtagggagaggaggggagggagtggggactgggattggcatgtaaaacaatcttgtttctaaatcaaataaaaaatataaaaaagagaaaaaagaatcaagtgacattagaataacaaaaaatacaaagtattgtttttcttaaaatatctttttcatttactcaaagaaacttaaataagaatgaaaaaacgggatagagaaatatgcattaaaatgagagcaagaaaaggggtaagagaaaggtccagtattctagcttaatctagccattgtgtaaggagctgcaaaatactgcgcccaaaagatggcgccagtttccgccctccgccagcccgacggcgagcgctctctgtggtaaacaaatcctaatttggtaaaggtcatgtatcttcttaattctgcttggagacaaccaatcctggcacaccacgtagggttaggtgattcgtagatgtagactatatcaggccccatctcccttggccctggggccgccaccatttacactgtaaagcaaagaggttcccgattaaactgtgttgaagaagattcctcagtgttgcgttgttcttgatggtcaagggtggacgccgcaccattgtaaaatttattcaattaaattcacgtaaggtaggcccattctcccatcagagaaggtctgtatcagttctggacatggacatcaataaacaaataatgagataccagctgattgaaatagtcacttcttaagctggttagatattaatgcttcattattggctttagaaattatgagattttaaaaaccacatttttattagttctttaagaattttatgtgttattatctgaatacattcatcacttctcccaaatcctcccataacttctagttccatagtctctttccttgcagtctaatttgagttttctcccttctcttcttccttctcctcttcttcatgttcctattctttcctacatcaagtacagtttgcattgctgagcaagtcttgggactggagcctgtccttgtttggggccaacctacctgttgtcacatcattaaagaaaagtgagtctccctatcagagcatctaccctatgccaataggtcctcagctattcatgcaattttgtaccaaatcccctctgctttattctggaatttttttctcccttgagcttgtacgggttttgctgttgtgagatttctgtgagttcatgtgttcacttgcccggttgagtctagaaaccataggttacttgatattatcatgttatcttccagttctgctcttcacaatctttctgccctttctgcaaagatactgtgccttagggagtgtaggggagttcttgtttgtatttccatttaaggtatgatcactccttagtctcttttttctgcacttgatcagttgaaggtctttgccttaattatcacctactgcaaacaagaacatctcagattagtattgagatgttttattatctatggttatagcagtaatctttaggaatggttttaataacatatctatttaggaatattgggttctgttctaaacctatgaccagtctagttatacatacttgacacatagaaaagttttaaagtttaaacactctagctttaaaatgttagagataaaacagaactattttctgttcgtaagtcacaactctctttagaacaacgcaaatcaatccagcaaaactatattcatctaaaaaaagaaaaaaaaccataaatcagttttcatagcactagtcactggggagataaggagagaaatttagaagagacaaagactaccgtgtaggatccatgcaaggcagctcaagaagacagtggttttttacaatggcaagagtgaaatcagaggaaaattgaaggaatgatgagacagaccaaactcagcctggcatactgaggatagggtgcttaattcagtgaatatcaaggaatataaagaggttaaatacaaacaaagtgagtataggctgagataacagtctcaagtaaatgggagagcatgtttactgagaattgcaccaaagtcttctttgtagaaaggaacaaggggtagagaaatattcaaacaaaacagacactgatgcaaagcacaatagacagaaaataagttgctaggtgtgcagtctttggtaaaatatcccaactagtcaatactgagtattataagacttgacatttcacctctatgagactgaaagacacaaggcaattacactgccataaaattaattgtgaaccaaagacagttatttccaagtgacagacaccatcactcagtgaacaaccacttgcattctaagtcagatgtcaactttagaaacaattcaaaaaataaaaagtagacagtggattaaggcaaaaatataaagtcaaattctcccaatattttcatgaagatgttgaaaaactgtaactaattctcacttgaactagacacaaacagatgtgttttctcccaattcctactggtaagttatgtaggaggcttcttaggagtttatcattagttgttctgttcacatctctgttcagtccttgtcaaagttagtcaccatttgagagtctctaaaggaccactttcacatgacatctaagtacactgaagacagactaagagataaggtccaggtggcagctagtttccatttaatatttaaagtgctgcaatttccaaattttctgtttcataatgcccagctcctatgtttttcaaactgtccacaaaagggagattaggaatgtgtgagtgcttttacagaattaaagtattatttatttccattataaaactaaagcaaaaacaaaaggatctaggagacacagagaaaaaaagaataagataatagagtatacaattaaagaaaatttttacaataagacgatagctaaggagctgcagagatgcctcagattttaagagcatgtaatattttggcagaggatctgagttaaccattagactaaaataaaaattaatatgattaagaaaataattgcactcctccttctgtgcaactcgattccagttcagttcattgtttagctgttgttttctgcttctacttccatcagctgatggatgaaggctctaggatggcatataagttagtgatcaatctcattatcagggaagggtctttaaggtagcctcaactctgttgcttcgatgattagttggtgtcatcccggtagatctctggacatttccttagagcctgatttctctttaaacctataatgacaccctctattatgatatctcttattttgctctcctctattcttccccctacacaaccttccttctcctttatgtcctcctcactcctcttcttcccttctcattctcctagctccccctcccctcccctatgctcccaatttgctcaggagattttatccttttctgcttctctgtgggaccatgtatgttgcccttagagccctcattgttgcctaacgttgtctagtggtgtggattgtaggctggtaatcctttgctctatgtgtaaaattcatatatgagtgagtgcataccatgtttttctatttgtgactgggttacctcactaagaatggtttcttctagttccatccattttgcctgcaagttcaagtttccacttttttttttgtttgtttgtttttgccactgagtagtactccattgtgtaaatgtaccacattttctgtatccattctttggttgagaggcatctaggttgcttccagtttctggctattacatataatgctgctatgaacatagatgtgcagatgtctttgttgcatgaatgtgcttcttttgggtatatgcctaagagtcggattactggatattgtggtagactgattgccactttcctgaggagtcgccataatgaattccaaagagggtgtacaagtttgcactcccagcagcaggggaggagtgttcccctttctctacatcctctccagcataagttatcattgcgtttttgattttagccattctgacaggagtaagatggtatctcagacttgttttgatttgcatttccctgatggctaaggatgttgaacacattcttatgtgtccttcagccattttagattcctctgttgagaattctctatttaattctgtacctcactttttaattggattatttggtgttttggaaactcgcttcttgagttctttgtaaattttggatatcagccctctgttggatatataggattggtgaatatctattcccattctgtgggttgccgttttgtcttgctaactgtgtcttttgccttacagatgcttctcggtttgaaggaggagtgatgaacaaagtggacaagatcaggctggtgaaacccacagaaagagctgacctgaataagtgggagctcttggcccccagactgatcactggaaaaccagcatggaactgatccctagcccatgaatgttggtatcagtgaggaggccttggaaatctgtggggtctctcgtagtagatcagtacttatccctagcatacaaatgaactttgggaccccatttcacatacagggatactccctcagcctagacacatgggggaggtccaaaggatatgatagacactgaagacccccccatggaagacctcactctccctggggagcaaaaatggtatgggatcattagggtgttagtgggggtatgggaggagaggagggagagggaactgggattgacatgtaaaacaatcttgtttctaatttaaataaaaaatggagaaaaaaagaaaattattacagtcatagcacaagacactatgacataagttctcttactttgtaacagattttactaggacaatgagtcttcatactgtgtgcaattttgatatatcaaaattgagaattagtgtctttcttttaaaatttcaaatgaggatataaaacaccacatagacagtaataggcctgcgatggcttagtcattaaagtggcagccagacaagaatttggacatgaatttggagatgggactttgaagagtaagtgtggccttgggaagtaggtgtggtcttgttggagaaagtatgtcacatggggcatctttcatgtttctttccatccaaatttgctcaatgtgacactgaggccactctctgctgactttttaaaaaagattttcccaagactatgtcttcttacattatgccatgctccctgtcatgatgataatggactgagcccctgaaactgtgagcaagtcacctcaattaaatgttttccttgtaagagttgctgtgttcatggcatctcttcacagcaatagaaactctaacaaagacagatccccagcacccacataaaatctagaaacactgttgcatgtatctgtgaccctctagttgggtttgtgtgaggagacagacacttgaaggttattagctggatatgagctccaggttgagggagcaactctgtctcaaaaaataaggtacttagtggttaaagaagatatccaatatcaacatctcatcccatgcatacatgcatgtaaacttacacatatgaatacctgtgcatatagatggattgatgaaaatagatggatactacatggatggatgaactatttatagaatagataaaacttaagataaactagacaaataggcagaaattaatatatgaagaaagatgatagataaatgatagatgatagatgataggtagatagatataagataggtagatagacagatggattgtaggaaatactagacagcagctgcacacagtaagaatattttttctaggtttacagagaaataattaacagactcaaatcttatgaaggtaacagtcactccatacaaccaagaaaaatctctagaaattataatctctcatattcagaaataatattcatagcatataaagatattaaatacagatcttaagtaattagatgatgatgccttacacatttaatcattataattcttagtagtatttacgaagagtctatgcaatgtagaaattctatatttaaaattaacttgagcgattttcttttttgagtacttgaacatactgttattgtttctccatttggaaggcatatgctgatttttattctatgccttgccatcaaatatttctttagactttgacttgtgtgatgatagtatgacattttttctacattataaccagtcagctttctgaggtaaatatactaaaactttaaataattaatttttcattttcttaaagaaataatataatattgtatatgtacaaatgaaaattaaataggtattcccttgagtgatgtaattctccaggaaataaacataggatagaaagataatataagattgcatcatatattagaaactggtaaaattctgagagcaaaaacagtaagagtggagttgaaatatttactttggacttttttgttttataactatgcaatttctgttttatttaaaatacattcctttgggctgtagagatggcttagcagttaagagcactgactcttcttccagaggtcctgagttcaattcccagtaaccacatgttggctcacaaccaccttgaatgagatctggtgcccactgcttgaatgcaggccgaagaccgtatacatagtaaataaataaaatgttttttttttttaagaaagaaaatacattcctcactcatacaataatcctgaccacaggtttccctccctccaaaatatttgtaaacagaaataacactaagattaaatttttcaatacaagtcatggctcatgtttatttaaaactcatggatgataccaagaaaacaacacacttgagctcatattttggatgagagtaagagtactcatggtaggtatttactcagacttggcatggaaattgtttcataaatatgtattcatagtgtgcattagtaggcactttaccactaacctgcatcaccagtccaccacatcttaactagacacatttaatgttctctccttggccaaagtctcccaatcctcctgctagctcagcactatctcacattaaggaatgggtgacgataagaaagtcagaacaaatatagtcattatcagacattttcatgtcacacacattctgcggttcccttcatatgtttcacttagtttgcaagaccatggatccctatttggcttcttcatgcacacttaattttggtttacctttctccacttctcattccccttaccctccacttccttgaatggtctgccccagtaattcttttattgaacttgtgttacagagttcccctctttaaatattcctttccaccatgtttgcaatttcttaacccacgctcactgcaaaagacatgcaaaagatttgaacctagaattttgtatgaaagagaacatgtgataattgcctttctgggtctgtgttacccaactcaacatagcttttcaagatcatgttttcccctccaccagattcccctaatggaaataagtagttggagtcactgtgtgatttaaaaaagcaagaaataaagaggaagtgatacatactggagagagagccaggttcgaggaaggtggagggcatgagtgaaaatcagataatgaaaatgcatatctacatctacgaaagtatcaaagaattggaaaacaggatatgaaagaaggcaaaatccaagtcaaacagcatcttgctttcagacaaacgaatgaaatacatgtttgcaaatatcccttcagaggcttcttatgacatcacacattttcttctttgaaactttagtctcacttacttttggtaaatctacttctttcatattcctttatgaagcaataaatctaccatcctctggaattattaaattgtcctttaaataaaggaacaagaaacatgatcttgataaatgttctcatttagaggatccacaaattaattggccttctcattttcaaaccaatatgctaattatctctaattttcttatgttaataatgtgatttgatgcagaggacatccaagaaatgcatattatatatttattagtttggcatttttattttgcttagtcttgcctatcatcacaaatacaaattaatcacatttcagtagggcaagcaattcctagacaacaaacaccataaacaaaataaatcttctagataaattaatgtacaactaataaaacattccagaaacttatattcagtggatggcatcaagaaactgcaagtggaatgcatctatactcacagtttttaacctaataaagaaatgactgatgagtaatgccttgaaaagcttagaattttacacattctggcataacagatgcagcaggactaccaagtctatatgaatgctaacaggtatctgagttgaaacagttgctatgattcttgagaaaagaagttatccaaggttcttgtccgggtagtcattcatggcagtttagctgaatagtcttccaacatagtagaagaaaggcatattggaaatggttactctatctcctatcttcaaataagaacaaggatttttttaagtctaccattattttagctttagtatttttttttaagttttaagaaagtatcactgctctaaaaaaatcaaataggcttttattttcagaggcagtttaaatgttagtttatattccattttatttttatttaaaagcaataaaattagcatcaggtttactatacatgtattgttattttctgaattaaggtaatactatcttaattcatctcccttattccacatgtcccttcagaaacagttgtcttgtacctactcttagctattatctatattggtagaggagacccaggatgaagaattctctagcaggccagagcatgaaaatcaagatgctaatgggtttttgtcctttcccccttttttcttctctcttgctaaaagccattagattatactcttaaagctagcaaccaaggtccagtcccttatttggctactggctcattcctgagacaaacaccaaggtccaataatcaaaattcactatttggctaatatatccaagcaggaattcctaactcaccctagcacgactccccatttatccccttaaaacctcactcatgaaaaaaaaaaagcctgcttattgcttgttgttgttgctgctgctgcttgctatcttctttgcttgatgaagaggcagccaccctccccaaactgcttgccccttgctgtaataaatctccttagtgctgagtttggtatctgggtacatcctctactgactcctgggggctgctatccttgcacaggactacatttataaaggtaaatataccttcttctttaacatttacaggccttcacatgtttctatgtcattggggctgatgttttctacaaatatacacattacatgcaatgatagagggacttcagccccacctttcaaggattgtctaaagattactagaatcaagttcttccttaactggtccaggaaggtgtgagctatcaacccttatatatcacctctaaaatagggcagcaccagagcagaatgcaactcccccttctttatttgagagaattcctgaaaattcatttccattcccaaattctaatagaattagctattacctcagtttcccctgaattacagctcaacttcattatacactcaaccacaatcccttcaactcttttttaaactttataatttttattgtaaaatatcttgcaaataaataaaaacatcccacatgaagtttaagacccaaaatctatgtaactcaatgaacatctacaaagttagaataggcattcggaatggaagctggagcttccattaaattgaacacttccagaataaacaagtatcatttgaatggcacagatcagaagatattcctgcgagtggtcttgtcttgaacagaactagaccagtgtctgccactgttggacttgaccccagggaacagatctgaactgagattgtgaatcagaataccaggcaggggcaagaacttacaaagccttccttgtcatagctgctgaccctagtgagctgtatgtgcagctgttactgttaatatgttgatcagtttcatccttgaccccattataatgtcaatggtatgatttctgatgattgtgtagaactggtcccatctcaaatcaggataagacagaggagtggaatacaataggatacactgagaagagaaattttcttgcataatgttgtaattgtgctagtttattagtttgttattattcccttattgtgcctcatggggataattaagtttataaatttagctttatcataagtaagtttatataaaattacataaatacttccattacctgggttttacacatgcacagtgggtgtgtattacaatggataaagaaggaatattatataactgtatattagaaaataattacattagttatacagagtggtattggaaggtctaaatattgagcatttcattagcacataataaagaacaaactaagtattcagtgtggacccaaagtcatccagcccagctttttaaaaacaaacaaaaatctttttaaatatttattttgtgtgtatgaatggtgtgtctgtaagtattgtataatacttacagaggtcagaagaaaacatcagatgcccccaaactgcagttgcagatagttgctcagaactgcttgggtgctgggaaccaaatccaggtgttccactaaagcaccagtgctcttaacagctgagccatctcatcaagctcagattcttgttcataactattcaacgttcaatctcaagttaacatgaactttaaaaggatgaaaacagtgaatgacccttcctaataagacttacataaacaactaaaataagtgtcaccagggcaactgtggagattctcaagttgacagtttctcaaagtagtaaaacatgttccagaagccagggaaggaacagatttcagcagtcttcaaatagaggtgctgatacactttccaaaaactgaaattcttatttctaattgctattcctttagagctggaaggagaattaaaagaagcttgagcccactgctgtctcccagcaggtcattaccccctaaggtctataagggatatctggtctttccatatgggtagctgatcagttttctactgcattgttgatcttattaccaataaacccaaacagggaattttcaggtagctcaaaaatctcataaaactaagaagtacatcttcaaattacaaaaaatgggaaaattataaaaaatctatcaacttacttcctgttttcttcagctcttccatttttcatatatgtatgtatgtatgcatttgtacatatgtgtctggggggtagcaatttcagttaccaaaacaagcatactgtttctttgtatacatatatgctgtgagaaagattaatttataaacttgattattggttcatgagacacaatatatgcttaacagtaactaataaaagttagcacaatattaatgttctgtaataagaacctattctctcaggatacctgggcaatgaaagaaagtgaggctaatgacattgaaataagtttaatcacatgaggggagattgtagtaatgtagctgctacacactggagcaaaccacacatagctaagaaaatttattggtcatgaagtcctcttatcacagtttattctgcttcaaaatcacattttctttttgatttttcaagacagtggtttcgctatgcaacaaacctggctgtcctggaactctctctgtagaccaaattggcatctcatagagattccccctaactctgccaccaagtgttggggttaaagatgtgtgccatcaccacccagctaaaattacattttcaggtaagcttccagggcttgaagaggtggctcaatggacaagagtagatgctgccatggcagaagatgatggtctagtttataacacctacagctggcaaatcaaaaccacctgtaacttcagttctagtggattcaacatctctggactctgagaactgatgcactccctcgtactttctatacacagtgacatacaaataataaaaatacaataataagtgtaaaaaaataaattctctaaactcatatacaagatacacattatgtattcatatatgtataaaatacatatactctgtggtatctaatatatatatatatatatatatgtatgtatatagtgagtactgtttcatcctttatttataaatttttgtttgaatcagatactaggcatttatacaaattaaagctatgaaagcttttatttcccttccaatgtacatatattcattattttaagtacaatttatggaaattatgattcttaattttattatttatattgatttgttctatcaaggaaatgtaggaacataaaaaagtaaataaagtggaaatgattaactctcacgcaaataatggttatgatattgcatgattcatgcatgtctgtcttatgatgaaaagcaacagtgtgctgtgggctaacagacaaactgttaggactgtgaagagaaaggaaaaggaatcactttggtccttaggttaacagcctagaaatagggaagatgcctaaaatcaccttgtacttcagacagataggaaaacagaagaagggctaagagtacttgtgttgaagctggccctcacaacatgatcctaccattacaggagatgacaagatgggtaaatcgaggaagaaagaaagactggccatgcaaactctccacaccttgaataactattgatgtaggagggaaaactgcattcttcccaggaggtcatgaaacttagaactccgtagaagagtaaagactcatgtgatcagaaaaagacagagatatacagtaaagactgattcattggaacaaaacctttaaacattatacagtgtgtttaagaatatacatcagcttggaagagaaaaagaaaactataaagtccttaaaaagaaatagaatagctgggtgtggtgactcatacctctaatcccagcactccagagacagaggcaatcagatctctatgatttgaaggccaggctggtttacagcatgaattttccaaaaatacccagagaaaccctgttccccaaaaattaaaaataaaagaaagagagttatttaaaagaaactacataaagatggaaaatacacagagagtctgggttctctgttattgtgttgtgtttgaattgattgctgagccagaaacaaaagctgctaaaagacatttgattataaatactgctggattaaaccaaactatatattttaaaaatgccttgacttcaaaatttaagtgtaaggacatattactttgtaaaagaggttctgtttatgccttcacagaagataaaattctgtggattcttttcagactaacatggtttggtcagacaagatcccttgaagctgtgcccaggtgatccaacatccaaaacatctgagaggatgcagcctcacagatgactatggccaggatttggttgtggttctgggttttctcgggatccctttggggctgacagcatccccaaacagcatgaagctgcttggagagagctacacccacattcccaaatattgtctaaaatgtttgtttttatttaaacaggcttggttgtaaatgattaaggatcacagtcaatctctttctaaagaaaaaggggaatatgatatagtaatgctatttttcattggtatagattttggtttattgatacaaatttaaggtcaattttggtttatatatatttctactcttgtttaactattgtgtttatgtaactcttttaaaattttaatgcataactaaatacagattatagtcacctataacagttaaaacttatagtcatgttagttacagagatgtatttcaaatggataggcattcttcaaaacttttcaaagacctgcagaatatggcatttaaaaggctcctggcaacaccaattatgtcagagagggtaatgggcatgggagagactcattatggagtttgccttcaatgaggcagaaatggccatttggataagaaagtgctcatgcctggactgcttgacagcatgctggccacactggacaaaagggtggcaaaaaaagtgactgctgaactttccaagggacaggatggtccttcaaggttcttgattcatagaaaactttgccagacactttgggcctataggctgaagagggatgccccaaagttacagagggattgtgggtgactatccatgcagtgagatgtctctgtctagagtttatatcttatccttctgaggtcttggatggagttgaagacagatagttatggctatagtttacctcagttatgataaaagagtaagttacatacaaaactttactcacaaatatagggctagatgatagaatattttctttaaattttgccaaatgttagtggagtaaatattgttaatggtagttcttgcttggttaatgctttttagatataattttactatgttaaagttaaaaatcttttttatttagatggaaaagaggagatgatggggatgttcttctgtatgctgtgaatatttgtttctcttattggttggtgaataaagctgtttccactaatagacaggcagatgtagtcaggcaggaagtataatcgctgattatattcatcactcctattcaggagatttctagggagagaaatgcagagtgtgttgctggaaagactccatgtagctgctggggaagaaacaggttctggcttctctagtaagctaagaccatgtgaaaagacatagtttaattgaaatggtttaataattaagagacagctaggcaataagaagcctgagccatcagtcaaagagtttataattaatataagcctatgtgtgtttatgggggctgaagaatggcaggaccaggctggacagaaacatctatctacactacatttcatatgaatgtcatttaactgctcaatctttctccttattaggtacactacagcacatttgacattcatcttttggttttgacttatattcataagtgtggtaggggtttttttgtcaagaaaataatatgatatttctttctaaaataaataatccatctgtatcataacagttattttaatgttattagcatgactgtgatgctatatatcaccatgtaatttgactctcatttgtcccaaacgacattccatttcacattttatgtccttcttttagtagtaaatgaagtctttattaatttatttttctaatttttggcatactaggaaaaataattttctcacttcattaaatagttgttaatgtttattgtatgtctcttcaacacaatcataaagactactatttcatcattcctaataattttaagaatggtgaaaatctgtccactttactccacaattaaaacttcaaagacacataaagatgtattgagaaatatacatgtttacttatgtcagcagttcagagaacatacattaatccaattttcaaagtgaattttaagtttagtattttaggaacattcacagttaagtccaatttaaaaatcataactacatccactattttcctatccagaatttcagaaaatagtcagatttaacaaggccaaaatactgtggccttcaactttctaacctatagtcctccaacattcacttgtgcctgatgctttagttctatataaagtctgtctctatgtcacattgtgaaaactagttcgctagaatagtttcagttttacttatttattatctttttgcatttcttttcaacatggtcatttcacatagcacaaatgtctgtatacacctgtgcaatgggagcatgtgcatatattgtacatagatgcacacacagacatatacctgtaaatgtaactgattgaacaagctccggtatgacagtgttccctcacatcaaacccactgaaacgcatcaggcaatctccacatagtgaagaggtgaattctctataacatgaaaaaaaaaatacctagagacaaatattgtggttcaacctgaagatcagggaatcaaagcaaccaagctaccaggaagctctaaaaagctggggtgctcctattctcaatatggttgtagaatgaatgcctcatcccaagactttgctcctgtcttatatacctccctaatgccgggattaaaggtttgtggtctcaggtactgagatcatctttgtgtgaactgttgctctttaggactggaacagtattgaatagatctgggtggccttggtctcacagagacccatctatctcttgatcctgagttactggaataaaggtgtgtacccaacacatcctagcttctggttactggtattaaaagtgtgtgcctggctgggcgttggtggcacatgcctttaatcccatcacttgggaggcagaggcaggtggatctctgtgatttcgaggccagcctggtctccagagtgagtgccaggtttggctccaaagctacacagagaaaccttgtctagaaaaaccaaaaaaaaaaaaaaagggtgtcctggcttaggcaacatttagtaaataataaataatatatcaatacaattctcccaattcctgagataacaaaaacaacacacctgttgggacacataattttatttatggatatcactgatttcagcctgacagtaattttgtcataactggaatagctcttgcctgggtttagggtccattccaggtgcaatcatgaaagcttgaagaaatgaaaaaaaaagaaaaaaactgtgcagctttcaatctgccaaaagttcatttcataaatatcatttctttattctaaaatgcacatgtatacatttatccattggtagcttcactttgtgctaccacaagtatttcagatattttttcatggctgttgccattctcaagacccttctctcttaaataattgtttacagttcagaatagtacatctagattcccaacagatatacataagcacttttatttttttaccctttgctcatattcatcacatttactttactaacaattcgacaagtctcagaataacttattttccagtcatcacctatttggagatcctgtattcttcttgtcattattgtaactgttaaacattccttctctaatacccaccccattctttacacatctataaaatagaaaatatatttcaaaacacccagaacactgaagatgcaggaatacttagaaatggctaatgttggggcagatagacatgaacaaatatttcatacctttggagtaacccccatgggaatgtgtcaacatgtttcaataaattaaacaatctatgaaaagagctgtttcaaactgtaaatttaatgagttgttaatgtaattaaattgtttagatctctcaaattactttgtttactatgactttgtgtttcatcttccctgtcctcatcccagctaatctgtgcaatataaaattccttgcatttgtcacctgtcctccaaactaaatatgtcattaatttcttggtctatcctggaaacacgtgcagcttataaactatctgctcttttacatgttctttttgttatgtgtctcaaagtaagtttatccagaaccttaaatattctgtttcatgtttatataacttatatcagtcctcagcacagcaccatacttcaatattattacttgttcaacttcaacaattgacaatattagaatacaaccatcatggaacagttatttcctacataaaggtgtatcttctgtacccaaatcactggctagactgcaaagtacccttgattctccaacaaatcgacagggttgctgatacaagagaggcatagctaaatcactgtaatggctaccagaagaaattagaaagagtaaacattcaggaaggaaaccacagccaatgtaaactctttcttcaattttgtgttggcttttggaagatagcatcaaaatgagcacatgaaaactgtaaagaaaatttatggtggttcaaactcagttgaacataactcctctgtagaaggaaaagcatgcctgaaatatagaagttctggaaagaagtgcttgagcaaatttaaaaatcaaaatattctatatacttcagaggttacaacaagtgtataaaagccaacaggggtatgtagagaggaaaactattaagtccatactgaagttatgttgtaagacattcagaagagcctgtcaaatattcatttgggtatgcacaaaacagacacgcataattaatatcaacttatttgaaaaagtaactcagaacatgtataagaatattattcttgactggaattaaatgatatttcatgttacacttcaaaaatttctctcttcataatagatggacaacaagacaccccacctctagatgaaggggacacaacattaagaaaagaacctagtaagaattctatattaaataatggtaagattttatatatgttatagaaggaattttcctttccttctaagaggcagagctcttattagcagggctaataaacataattttccaactatttgaagtgtgattaattccaaatagcactgtacagatgatctgaaaggagaaatttctccagtgatttaactttctcttagacaagcaatctttaggaaaacaattatcttaattaactcacataatggtttctaaatgccagggcccaattctggatcttcctcgtagagcataggcaccagcatcgtgtgtcagggcaaaagcttctgcagcagacggggcacacagctatacgtatggtgattattaggagactctcagcaagatggcccaagagggttaacatctgttctttaggctgaactttatataatatgcataaatcatgatttctcaaaaacagcttttatgactcctcttaatgggagtatatagttgagcattccttcctttataagaaatgaaagcaactatggaaagtcttctgataaattttcataaatggtaaaaactggttgctttgttttgttggaaactagagttctcatttggagaaaaaattaggacttcagattgtgacgatgatacaataaacatctatatgcaagttagcagggaaacatttagtattgtcacctgaaacagaaataagaattatatttatgcctagtgtataaataaacatagggagcccattctcttagcctagaaatatgggggagggcctagtccctaccccacataatgtgacagactttgatgatctcccatagaaggtctcaccctttctatggagcagaagagggatggggtgaggatctatgggggtcatatgagaatgggaaggagagggtactgggtttgatatacaaaattagattgtttctaatttaaataaaaaaggaaaatacattttatatacccatatatataaaatatatgtttatgaaaattcaaaataaataacaaaaaacataatttctgattaactgagaataatgtgctcaagctctggagtgcatacttcaaggcaaaaaatagtttatttgtttaatgtggcatttacttggctatctttgagttcctggaaattcactataagttattaaagtggctttatgactaatatcatctctagcaccctggttcataggctgtcatttccatttaatgaaattgtggtgccttcatcattaaatttttcttatatatgttagtgcctattaaatgcagaaaccacaataggtggaaatgttatttgaattaaagaataaatagctaaggacaccagaaattttcatcacttttatattcccaataacatgcattcctatcttacaccatttttggagtaagtctttggattttattgttgtaaatactagtgtggtgaagacttttccaaatcccagcatataaactagcaaaagattcccaatcttgtaaggattaacaaggaagtttgactatagatgaggagcataagaatgaaatttttggcaatatggtagctgagtgttcaaaaggttgctgctcttgcagaagttaccaggacccacatctaactgataacaactggctctatctctagcccaaggagttctagcacctttcctggcctatctcatgtgcacacatggtgcacacagcaacaattaggcacacagacatacacatatgtaaagataaatataaaagacaagtcaatatttaaattctattgagtgtctgtacagtaatcctggggaaatactttttattttggtggtgaagacaaaagctttggtcctattgatcagatgtgaattcatgtatttagtgaaatgctgtttatgcaaaaatgggaatagaaacacaaatgtatgtcttttggcataataaggactttgcaatatttacaaagaaagtaatatcaggagagtgtgtgaaggttaaagattgataaccagagccataggtagtacacaggagtcaatgggtgtagttaaaatgaccagaagatcagtgatgaggaggggcaggtgaagtgagtggggtgactaaacacagctcctgtggcagatgaagtcagagtcaccaaatggagaacctggatagaaatttcaaatacagttctaatgcttttcccctgggcttcaaatagttagtgtccacatgtgcagctctcagtccatcatcatttccatttatcaaaatctaggaatcaggaagtaggtgaaagaaaagaaaagaaatggaaaattaacaaaagtaaggatacccttagtcaactgagcaaaatgattttgtttgagtttgtactgagatttgcattactgttatctcattcactctcacacctttaatcttaaaatcaatgtgattttctggcctgctccagtcttgattgtcccccttaagctttaagctccttgatggtaggatttagtttttaaatgagcctaaattcccttaaataagacaacggatcagccaagtattataaataatggcactataatgtgtttgaacttttgctaaggaaatggtgttgtgaaacttcattacaaagaaagaaaacaccatggggcaaacactgtggcctgcctttcaatcacaagtaatggctgcagggaaatatcagcttcctacaaaagtattaccagaattatgaaatataacttgatagatctcaaacttcaaataaaattctttcctgtgattgatgaccttggaactccagaggtaaactgtgcatctgtagtatgtttcatgtcagaaacacgtaacacatatgcgtgttttatgatttataggttgctacatagctggttaagatatattataaaggtcatgttgattaatctcccaagaaatcataatgcagtttcttatcgggtatttgaagtttctcgtagaaacagcaatgatgaaaggaagttatgtgggaagatggagggattaatttgtaatatggaaaaaagatcatagttttctaactgggatcacaacagagcttcactatgaactgaaatgtcaacaacaggactgtctaccgaaggtggaccagtgattggatgccagcttcccaatggaggggtgtgtgtggggggggagagtgagtgtattaggtacttttctcatggctgtgaccaagttccatagaagaagcaactggaaggaggaaaggttgatgttgacttaaggtggagggaatacacttcgtgtgtcagggcaaaagcttctgcagcagacggggcacacagctataccagagcataagttcccccatcagttaagcttctctggaagcatcatccaagatgctctcagatatggctacaaggcatcccttcatccaaccaggtggacagtcacgattagctttggctggctgctggcctctacagcccttatcacagagtctgctagaaagggaagtcatttgacctggcttcctcagagatattgcttgacattttaaaaaccatctgtttttatagaaaattacacttttcaatttagtttctgcatggataaataagcttgtcaattccgtgtcctcgctcctatcaataagtgatatactttcacttttaccatcaatcttaagctgtatataattgttttgtggaatagactgttggggaagtatgataatatttcaataccagtcccaccttataaagcaagtactcttttccattttaaagacatatgctatattgaaaaaaaatatatattgaggttgccctgatcccatgaagcaatacaaagaagagaaccccaaatgatgttaatattctagccatcctttcatcaccaaagatccagggcatctatgcctgtgggtcccagctggaaagttattccctggcctgagttctgctggacaatgatatttgagttataaatgaattgcccaataaaaatccttcctgagtaatcagaaatatatttgtttcctcagtttttgaaactttgaattttgtaagagttttcatttatggtgtcagatttatcatgcaggtaccttttgggtaataaggtaatgtcataattaaaattcatcagtttaatgtaaagattaaataacaggaaatgtcataatattatatgaaaattgatatattagtccagattctatagagaaacaaaactgatagaattatctatatatctcaaacagccatttattacaagtggtttacagtgtgcttgccaatggaaagtcaaggaataatgcactccatctatgagagtgcatatctaaactggtcatttctgtattggatcctaaaatagtagattctaatatagtgaagggacacctcagaaatatgataaagaaattgccacagagtgagtactagtagacaaagagcaaaagcttcctttttccaggtcttcttatgtaagctgccaccagaaagtgtgtcccatatatagggttagtcttcgagtctcaaatgattcaatccccaaaaatcctgcctgtccagctctttagattttagtttatttgagatgtagtcaatttgacaaccaagatcagccatcataactactattaaagcccttaggtaatggttgatgctgaaattttatgtcaaagttaatgatttattgaaaaccagagtgaagaaaagattcatcatgtattcctagtcacagtctcaatgtaaagagatggatttgtctttcagcagtttgtgtggatttcttatttaagcaattagcttggaaacatttttaaaagctataaataatttctgtcttcaacctgatctacattttactgtgatgtatgagatataattaaacacttgcctatcaatgagaataaaaaaagagatgctactgatacacgattaataaaattgtgaataaagctggaaaaattgggataacaactaatataacatgttactaagaaattcatgaaataaagaatatactaaatgcacacaaagagaaacattctgatcacctttaaaaacaaatattctgatctaggtggttttggcacatgccctaatcccagcactcaggaggcaaagatagcaagatctttgtgagctcaaggcctgtctggaccagagacatgttctaggtcagactccaaagctacaaagaaaccctgtctctgaaaaaaaaataaagattccaaggtatgaatagataaataaagaaatgcacatatgtgtatccaatatatatgcatatgaatacatatagaatatgtgtaacttatttaccaactggttgattcacactggattctgcgtaaggaaagaatagtcagccaggagaaagaatgagaggtatgctagaagtgagttagcataaacagaactacagagaactgaggcttgaattttacttgcaaatcagcctcaagaccttgagcttgctataagatatttaaggatgaaactaaggtcctgatatcaacttaatgtctttgaaaatacttcagagcagaaatgtaaagtacagtgattgttgttgacttcatataagaacagttttagaatggttagtcttgttgttcaggtttactacacagatagaaatgtttggaaacaaagaaaatgagtaaacactgatttccagctagtttattacagtttagaatgttcaaataaaatataatcctgttactgaaggtctttttctctaactggtcatttagcagcagtgatggagaataaggcatatcactaatgtttctgcaatatatatataaaaacaaacgaggtgaagaatgtgaaagttataagacaattaagtattggtaatgtgaaggataaaaaggttctttctcataattaggcttaaataggactcaaagttgttacattttggtatttcaaaaacacttttataaagtatttacctacttttgatgaatttaattaaacaaatgtgattaattgggagcttaaatagattttcttttatattgttattctatacacttggctaaatgctgtcagactctaggaatgattagttcaaacctgggtctgataatgaaagagaggaaagaaagatggagaatgtggtaggaagaaaaccacatctagtttctcctgttattttcagagtcttattcattctgtttcatgtctggatgttaggccagctttgcacagccatgtcttggagactcacattgactttaatatattttcaagtttcagtctgcataatgttgtcataaaccttaatgtgcagagcagttatatttcaaggagagttttatacaacagagtagctcttgtctctgtttcaatttatagcaacttcatgtcctaattcctgcacaagatatatcactgacccatgattactctccgctggctctttgccaatatgttggtattgaaaaataactacaatgtgtcaccgagacaggaagaaagtaagaccctttcataaaaagtaccctttaatgtgatccttctattacaggtgactatttgacagcagggattaatatagaaaaatcaccattgtgttgattaaattatatattattttcctgccaatcattaaactcatatcaaaaattttgtgagggattatttaaattttctttatcaaattgtcagtcttactatttggatggtgaaagctttgatcatagataaagtatgaagaataagctattcagcttatggtcaacacacacattttgtaatcatacctccagccactatttttctgtacattcctagccttctttgagtccctgatcattttgaattaaaggtaagattgtcatatataaatggtttcctaacatctcaaatggcttcattttaaatgaatctttaatgtcttcagtgtacctgcaattttcataccatctaacccctaggtagtgcttatgttttctgatcattctataaatattaatttttcataaagtctgtttggttcacacactgaattattaaagcatattgaagactcttaaaatcccatgattttgtatttttttgtttattcattgttgcttttggtgctcattttcttgatggataccaataaataaaataaaaactagcaagtccccaactcatccatccctccatccatttttgaatacttttatttgttctgaatgaaggaggggagaaggaaggaagagagtgaagggggaaggaacaatgagctagggagagagagaataaatatacacactttgacatataccacaatgtatttatttcattgctaataaaacagtaactgtaattgtaagttaaaattaaaagtttgtgtttgagtaagtaaatcatagaataaatactctcaaaatgtccttagttttatcagccatagtgtttgtattttgcaaatgtgacattttattatttttcaacacagataagatagcctcaaaaatttaagagtaatattttccatagagtatgtgtaagaaatttaagacagtaaaatactgtatttgtgtgttagtgttcaaaacaagtttgctcaagtgatctatcctaggctctaatatcaaggataaaatgttgtaatactgtggtatatagtgattaagttgggatcttcaacaaataatttttatgagtgttaagaacatgtgtaatgtgagcaagaaataaatatttggagaaaatcatacttgtgggcattcagaatgccatttttgaaataagatctaaatatgagtttgtgggatttaaacagaaacttgagattatgtgaattgaacaggtgagaaatctgaatttgccaccatgcactgaagtttcttgagatgactcaaggacctaggatgtagaaggtgacagtaatcacaagtgtaggaatatatgaaaaaatgctaaatattttgactataacatgcactagttatttggaaattgtctcactgagaaatttctaatgatataaatcacaggagaaaaaggttatgctaactagtttttgaaaacagggggaatctaaagagagggtgtttctgcctttgtcccacacctcctgagggaagcttagtgtagccactgtgggtccactgtcctcaacattatagtagagccaggttttcattcacaaaggcaggatgtgatgaagagacccaacaacaagatctagtgtgtaatccaacctctggcagaaagtcttcccattttcctccccactgatgcccacccatctgacatgctattccagtgataaccttcaactgtgcacaggtcactgtgcttgtataagggtacatgtattctctgtaccttgccatcagatgaagatgactgacttctgtcctaaggttcctaaggtaggacatgtgttctcagggctattaaagtaatgtatgggttcctatctttatgatcacaatctatatgttcttgtgaagtgaggatccagagaagatggccataaagcacttctgtaacacaaccctatgatagaaattggagagacttcaagtatctcagaactcagtcctgaagcagtgatttggactgaaatctgaagacttcaggaaacaaagaatgtgaggtgagcatttgagatcaaatttaaagtcttctctcaagactctactatcacaaaagatacattttcatttttcctacatacacatgtacagtcaattcatacattctgagttagagcattcactatctgagtagctttcctattggagaaaagaggagaggcccaaggtaaactgatctcttcataggagacactactgctgacaagggcaggactctgtgaaaagtgtgaggatacgatatacacatagaaaatgagaatgaactttacactgagatgatctaatttagagtgaaatgatgtcaaatgtagtttcaacatgaagggttttcagttttctggaaattcaggtttctgtatgaggggattagaggtaactagtctttcacatcttaaggtctggaatttgaaacaaagtggattttgttaccattctcttctgccacaggaagattagggcagttttcatagtttctaggatcctgattcatgtacagctcctcacaacaggtctcagtgttcttactttatatgctaattttacatttttctagggtcatgttatgcagccccaactggcctgtaactctctgtgtagagcaggctggcctcaaactcaggaatctgcctgcctctgtttccctagtgctctgatcaaagatgtgtattaaaatgaaatttcattgtgagatctttttatccttacattatatgatgatgtatgtctaactacactctatagagagttctttggggattgtcttttctagcttcctggcctcaggttttgttttgttttaaattctttaattactgctcatatttacatatccttcctccccattccttccccctcccatcctcccatgttctccaccaaccaccccaatccatcccccaactcctcccaagggatagtgagtacttccaccagggaccttaaaagtctgtcatcatttggggggacctcagttgtaagcttgttaaaaattactttagccaggtgtggtgacacttgtctataaccccagccttcaggaggatgaggaagaggggtaagcctaagcttcatagtgagatcatgtttcaaataaacaaaatcaaacaaaacaaacaggaacaacaaaacagtaagtgcatttttagtctggtgtaatgtattcttacccagtgaggatcctatacggtttttactttttttcctgcttttacctttttcactttgtgacttacttacattgcattgctttttttgatttttgttgttgttgttgtttttgttttgttttgttttgttttttactcactccaagagtttggaattaagtgcaaacttagtattatttcataagcaactccccagtagtttctcaattgccttcttttacaaaaattcaatttcctggttctgttttgattccatcttgatttcacatagttaatgatgtctctgagatagtatgtgtgaagaagcagttaatttaatgtcaaaataatgatgataatgctcaaaatgatttagtacaatgtcaaaccctgaggtgggtgttgtggcagttctcagtaaatagattttaaaatctattttgcttttgtagatgaagatattgtactgacccatcagattcctctgagcagctgcagaactgtatgttctattctcagtcaaatgaagataacaccatgcttttttttcttcccggggttatactaatttaaggtttccagagatatgctacaaggttcaggatacttacctgcttccttcttttacttaaggcctttgtcaacctgctgatttacatatgctcatatttctagaatgaacaccttgtttttgttcaatgatgatttgggaatgtcctcatcattttttattgacttgaattttttcttggtatcaaaacattatgcaagcaaaaagtaatcatttcctattatattgtcattaaagtttatttgtatgaaatattataaataattcctagatatttgtaagcagagaccctttgctctgaatgataccttggtagtgcagaaaagaattgatctacacttatggctgattcttagattcagtcattatcctgtcaagaaccttttgaaatgacattcttttaaaagtcagtgcattatgaattagaatgtctaatttcatttacattaccaatttcatgtaaacctgaactagttatcacaatatgacacagaggcaaactttacatagaattaaaacatcaggcgcaagtgatgtttggaggactatgtaggaaagaaaaaatatctcatatcaactatgatattccttcacatgttactgaagagaagtgtttcttttttaaaacaagaaaattattactaaaaaaagagttcatggaatcacctgataattaataaacagaaaaatgttaactactgagtttatgtttgtcttcttaactgggtgataatgagtctgttcactaggatagaggattcatgctatttctcttacagtttccattcttggtgggtaagatagattatccattataagacataaaaagtaaaaaatggtagcatgtatatttccatttatttatttatttatttatttatttattactctgtcattactacacaggcttacccttgtaaaagaatgctgatacagggagggttggttctgacagctatatgataaatagaatgacatggaatgcctcccagaaaacatttcatcctgttgaggaaaaataaggattccataggtggtaatagttataagagacataaaggatactgttatattctagaaactgagtgttttgaatgcatggcctttaaagacaatgaaaaaggagtgactggatcaggatgatattaccacctgatttgtatagtaaggtcattcaaacaacttgtggaacagggggtatattcttctgtggtgtggccttcattaagtaatctctcaccccaattcccattaaaataacacacacacacacacacacacacacactgagagagagagagagagagagagagagagagagagagaggacagagagagagaggacagagagagagaggacagagagagagagagtgagagagagagagagagatgcatggcatgaactaggaataggaattgagaaggcttccatcaggagaggaaggttagagggacaataaaggatgaaaatgactgagaatctttacaacttgaactgttaaaaactacaagaataataaagacattgcacgtgagggtcactaattgttggcatgaacacagggaaaacacataagaaaatcaagcaaggaaatacttaaataccatacagataaggaggtttgtcaaaactctgaagtcacataaaagagaagcagccaaccaccaaatgagtgagagaaaaattggaggccgagaagacatcagaattgccaggaatcattaaaaggaagaatcatcagacaagcaaatccatgttattttccactaaaaatactcagactaattcgttgtaatcctaaaatactgctctgtcgttggggttagacaatgggtaacatactgtctggccctggattactattcacctgacccataaagactcaaaaatgccctcacacatttttctgaatatacaactatcagcacacaaatgattttcatgaagagttgaaaaacgttataaattaaggaacttaaaatgaatagagtagattttaaaaatactaagtagatctatataaattagggtattttctcccatataacagggaaaagtgtacaatgcttcatttgaaatctgtcctaattaagtaaaacttaacagtaacatgattgaacatttcagtttttcattcttattattttaatataataaaaaacttacatttcataacagagagagagagagagagagagagagagagagagagagagagttaaatctgtttggttttaatttctagcagatgtaccctaatggatccttgtgacccctggtcccgtgaggtaggagggttctgaattctaagttagcctagactacatagcaggaccctctctctacaatgacactcatacacacaatcatacacacatcactgctaggctaagtcttttagacagaggatagagtattctgtgatccagatgaggatgagtcagtttaggacagttctgctgtgtaggaaaggtaaccatgtaaagaccataacagtcttcactaggccacatgccatgcattcatccccctctctcaccttgctttcataacgcatcctgttctccatccctgcacactccctttcctttctatcctcccttctgtctttttttttttgtgacacaaaaagtagtgtcaaatataagacaatgacttttttttaattggattatcatttgactgtgggaaaaatgagatttttttgtttttgtttttgtttttcattacgagtaagtctgtcaaactgcagtcatgggagtaatagactgcaagccctcatctatttcaccatactactattttctgattgagctaacggaaacttgagagtgatggcttgtcaggtgagcataatattcctggcgtatgtcacatcatttttcttctctagaaatactatggattagccaggcagtttcatttataaaatcagtgagaagaggaatggtaataattttcattcatataaggaaagaagacataaatatttaatgcaccactcagtaaaatcttcctaaaaagacaaatattgcgaatatgaagaagtcagattacagatgaaaataaattaatttcagctatctcaaaaccatcacatatgtgggtttctaaaatggtttctaggtttctcagtttctaatatttcccagaaaacaacgctctgattcattcccttttaatgtagctagttttttaatatagcagatattgaaacaacttggaataactattccttctcacggaatgtcattttggaagagttcactgtttattgctctagaggcagagggacttgggacaatgaagctgaaaaacaaggcaaaataaagacccatggaatcatctacttcattcagaacctcagacaatttgtattctgagggtaaaaatgagtcacatgagaaaaagttatttaatcacaagagcaagacacaagaggcaaaaacatgttttttctatagaggcatctaaacgaataacaatagctagctgcaatgaatgatctaacataactttgttcatttccactacaccagagaggggcatgaaagcataattcaagaacaattctgtaggccgggaattggtggcacacgcctttaatcccagcactcaggaggcagaggcaggcagagatcagcctggtctacaagagctagttccaggaaagcctccaaagacacagagaaaccctgcctcaaaagacaaaaataaataaataaataaataaaaaataaataaaaattaaagcaatgtaacaggggttccttaggcccatactgtttcctaaaatgtaactaaggccataaaacccttgtcttggtttcttgcagttttctcacaagcattcagaaatgacctcacaggactccattcttggacattgttctgacagttcacttaagacaatcaggtgtaatgatttggaagttatatgactgtgtatttaatcctgaatacaaaataacattactttatcctgagtcttcagttcaagcttaaatgcaaccttttattatacatcagaattgcagaaataacacacagatgtgaatcatagatgagatctgagtgtgtgtgtgtggaggccagaggtcaaggagattttttttagcatgtaacgtaaggtttctgtttttttgagacagttctctcattgtccttaaacacattgtttgcaccaggctaactggcaggaattccaaggattgtcctatttctacctctccagtatggaaattatcagtgtatactaccatgcttactttacttttttccttgattttgaaattaatataagttcaattccccttcctttttcacactaatcctgtataccctataccttcaatataccccttccttctctttcaaattcatggcctcttttttgttaattgttgttacatgcataaatgtgcatatataatttttctatactgtaaccttcccattttgtatagcattactcataggtattatctcggggctgaccatttggtattggattaacaatgagtcttctcttctctgaagaagattatttcttgcactctcagttagagggccaaggagtcataccagagccatgacaggtttccaatagcccctgccagggacctttccttagtttcaatttactacagatggctgggatgagcaaacttttttggggggggaaggggggaaccataactcagagcaaccaatcattaggttttccacagacttctgctagctcagcaaatgaccacaaccctctggtggctcagtgaatgatcacagtctcttgatagctaaagatggtgctccctaccctgccaatgggaagtccctaactactaaagctactcaccaatcagcccccagactaatctctcctcccttgaattctcctaatccagtttaaagggggacctgtgagcctcccaggctgtcaccctgtatcaccccaactttttggcaggtttttagtaataaaatgctcttgctgactgcatccattactggtggtcttctgtgggacttctcacagaccttaacatcggcactccttgtttgcctgtagttctttgtgttaagtgtaggctcttccctctcatccccacttattttcacgtatatatttttgttgtcattgttcagttaatatttggctgcttatgtaggagatactttatttgttgtaacttctaagattaggacactactttagagtaagttacctgatcctctggtttacaatcttctcacattctttcctacagtgttccctgtaggaaacttcaatgagccttcaatgtgagagtgttttacaattgtgtccactggaactagcctccgcttgtgcattttgatcagctgtgcatctctacaatgctcttagtctgttgcaaaatgaagtttctttgatatggaataagtacaacatttacatgtgggcatcagtaaaatattttagtgtggttaggcattatggtggaagtcgcagatactggttctccttcaagttccatgcattcacttgttgtgagtagtgggctgtgtttccagtaccaggcatgatttacctcttgtttagctggtcttagttctgactagagagcagttggctaccactgagttatataaggcatttataaatccttggggttattgtgtcagctggaacttgttatggtgcatatgtggtatagctgggtaaacctctttggaagcttgcatggcaatttcttttttatctttttttattaatttattttttacattctaatcccattccccctccctcctttcctcccaatccctttactcctgcctcctccagtctgctccacagataaggtaagtcctctcataggaattctactaagtttgtccactcatcttgttgaggcagggccagattcctgtatcatgaaagttagccctcagggagaaggcattcaggtcagttccaagtcagttgtctctgggccaggtctgaaatacatagtgtctttagcaataggtacttatatgccacatctctggggtaaacaagggcattaagcttagaatttttcatatgtcccatgccaggcaacccaaacatctccatgtttgtataagtactagaagtttatcctcaacttagagtactggcatcaagttatttcttttttatatattttaaattatttttattacttaaaattagaaagaagcctgcttcacatgacaatccctgctccctctccctcccatcctcctccaacccctaccaacccctcacccactctcccctcagggagggaaaggtcctccacatgggatccccagaatctgtcatatcatcctgggtggggcataggccctcccccatgtgtccaggctgagagagaatccaccaatgtggaatgggctcccaaagcctttcttaccccagggatatatactaatctactaccagaggccccatggagtgccaaggtgtcctcactgacatccatattcaggggtctagatcattcccattctggcctcacagacatcagtctggagtccatgtgcttccccttgttcaggtcagctgtttctgtgggtttcaccaccctggtcttgatctctttgatcatcatccctccctcactgaaactgagttccagagttcagttcattgtttagttgtaggagtctacatctgcttccatcagccactggatgaaggctctaggacagcatataaagttgtcatcagtctcattatagggataggacatttaggatattccctccaatattgcttatattgccagttggtgtcattcttgtatatctctggaaatctcactagtgccagatctctcttccaagctatagtgactccctctcttatggtatctctcatctgctctcctctatttttccctggactcaactttcctgttcccccatttcttcctctctcctcctcttctccccctctctcccagctccatctcccctacccccatgctttaatctaaaagaggattaaaacataaaagtaactatagttcttacttgataactcttttgttatatattttattatgttaatgttaaaacccttctttttatttagtcagaaaacagtggatgatgggggatacttctgtgtatatgtttgtcttattggttgataaataaaatgctgttggtcaatagggaagcaagttgggcaggactaggagtcgaggagtattctgggaaatgtagtaaagacaaatcttgtgattcaggcaggaagtgacatagcaggcagactcagaatataagcagggacaagcaggaaattcctcctcctctcttctctgtggagctaccatgtgatccactggtaagaaagagctcatacagctggcatcctccatattatatgttcttataaaatataaagattagtagttatggttgataattaagagtgagctagcagataagaaattctagcctttggtcagcagcattctacataatatgactcgctatgtgttacttgggactctaacgtggaggagggcagaacttgggcaggggcagagagatatatcgttacagattgtagactggtaatcatgtgctctatgtctaaaattcatatatgaatgagtacatatcatgtttgtcttttcgtgactgggttacctcactcaggatcatttcttctagtgcgatccattcgaatgctaatttcaagactccattgcttttttacagtgagtagtatccaattctgtaaatgcacctcattttgtctatccatttttcagttgaaaggcacagaggctgtttccaggttctggctattacaaacaacactgctatgaacatagttgaaaatatgtccttgatgtatgaatgtgcattctttgggaatatgcccaagagaggaattgcttgatcttgaggtagactacttccattttcctgagaaactgcaatactgatttccaaagtggtcttacaagtttgcattccaccatcaatggaagggagttcctctttctccacatcctctctagcatagattggcgtttttgattttggccattctgaccagtgtaagatggtaactcagagctgtttttagttgcatttccctgatgactaaggatgttcagcactttcttaagtgtctttcagccattttagattcctctactgagaattctctatttagttctgcaccctactttttaatttcattgtttggtgttttggtgacaagcttcttgtgttcattgtatattttggaaatcaccctctgtcagatgtgggtttggtaaagaacttttccaataatgtgggttgccattttatcttgctgactgtgtcctttgccttatagaagcttctcagtttaaggaggtccaatttattaattgtcaatctcaatgtctgtgctactggtgttatattcaggaagaggtctcctgtaccaatttgttcaagggaatttccgactttctcttctaagaggttcagtgtggctggatttatgttgaggtcattgatctatttggacttaacttttgtgcatgacaatagatatggttctgtctgtaatcttctacatgttggaatccagttatgccagcatcatttgttgaagatgcttttttccccagtgtataaatttagcttctttgtcataaaacaggtagccattcatgtgtggattactatcagggttttcaatttgcttccattcctctatctttctacttttgtgccaataccttgctgttttcagaactatggctttataatagagcttgaagtcatggatgctgatgcctccagaagttccttcattacacagggttgttttggctatcctgggttttttgtttttctatatgaagttgagtattgctctttcaaggtcagtgaagaattgtgttttgattttgataggcatcacattcaatctgtagattgcttttggtaagattgtcatttttactatgttgattctacctatccaagagtatgggatatctttccattttctagtatcttctttaatttctttctttaaagactctaagttcttactgtacaggacttacacttgtttggtgagtgttacccaaagatattttatgttgtttgtggatattgtaaagggtgatattcctctgatttctttctcattgctttattatctctacatagtaaggctactgattttggggggttgattttgcatcctgccactttgctgcaggtgttcttcaattgtaggagttccctgcttgagtttttcatgtcacttatgtagactatcataaatcaagaatagacaagcaatttaaatagacctataaaccctaaatgaaatagaagctgtcatcaaaagtctcccaagcaaaaaaaataaaataaaaaagcctatgaccagatggctttactgcagaattcaaccaggaattcaatcaagagctaatgccagtactcctcaagttgttccacaaaatagaagcagaaggttcattgccaaactcttttgcaaggccacaattacattgatacccaagccacacaaagacacatctaaaaagagaactacagaccaatacctctcatgaactttggtgcaaaaatcctcaactaaatactggtaggtcaaatccaagaacacatcagaaaaaatcatcgacaatgatcaagtagtgttcatcccagggataaaaggatggttcaacatatgaaaatccatcaatgtaatccaccatataaacaaactgaaaaagaaaaactacatggtcatctcactggatgctaaaaaagcctttgaaaaatcttcatgacaaagatcttggagagaacaggaaaacatgaacatacctaaacatgataaaagcaacatacagcaaaccatcagccaacatcaaaataaatggagagaaactcaaagtgattcctctaaagtcaggaacaagaaaatgatgtcaaatctctccatatcccttcaatatcatacttgacgttctagctagagcaataagacaagaaaaggagatgaagggcaaacaaattgaaaaggaagaattcaagctttcactatttgcagatcatatgatattcaagttgtttttttatgaaaaataaagaattgatctccatctcccttcaagattcactcctcaactctttctaaatgtttaaatacacctttatagtcattgaaataaataaaaatcaccatcttacaatctccaatgaaaatagaatatatggattctatataacttatctgaaagttaattattaactggtatattttatttagatctattcaataatatatattgtacatataccataaattaaatattagatctatccaattattcatatatatatatatgatatccatatattcatatatatataatttagccatatgtgttaaaaagagatgtttctttggattttattgtttttgtttttgttgttgcttttggtggggcttggggcagggtttctctgtggttttcgaagatgttctcgaactagttcttgaagaccaggctggtctaaaagctcacagagatttggcctacctcagccttctgagtgctaggattaaaggtgtgaaccaccacagaccagatagaaagagatgttaaatctatctaacatatattaaaccattataacactatttatcaaatatcatatatacttaagtaacataaatagatagagagagagctacaaaatagtccctttgttaatcatttgttaaacatagtgactggaatgactattgaacaaaattcaaatttgtcctcttaatttgatctggaaattaacaatactttgactttatttcaatttcatacaaaagaaacatgaggtagaataccaatagatctaagtatgaattgggttaccatatttattgtttcattgctctgtctattttgagacttataatagcatcaactcttttctttgtgtgatctctgatttctaggttaatatatgagttttagttagctctgatttcttaattccagcttcgtttaagagggtcttataacaaattcttcaatgattcctgtctttcagatgttggtctacattgttttgtatccattactgtttaatcaaatgcctgttgatataagtcactaattccaggtaccgtatctgatggtgttattgtatagagattaaataacaacttgggatcttttctttccacttcttataaacattggagaattctatcagaaagtagtcattaatttcctttctgtatcaaaacacacttttatagattattccacttccttctatgtccttcctctcaattccataataaaacaggcagtgtgcacaatgtttgtgtcacttcatttgaaaactcagctttgtaaaacccttattttaaaatattgtatacatcagaagtcttctaccatgcacatcagatatcaatttaagcattaaaagtgaggtgcacatagaaaccctttactgagagcaatgccaactttataatatggattataattattgaaaaactcagaataataactttctaagtcagtactcaatagttgtcccttaaatcttccccttatactgattgtctattttatgaaacttgagccattcaagatcaaatagtaaagttgtccatgtgtgggtgactggttcagaacatctgaggcagatgggtgaaacacaaggagaaggaagctctcagattaataatgagaatatagatgatgagtgacagggaaggtggccagcagaatgaacagcagggaatttctaatattgaaaaaaaagaaaaaaaaagaaaagaaatatttggagttttccaaatgtcaattactgaaaagaatttcaaatattcattatttcactcagaaattgaaatatttttaatatttaaataaatattagctttgcttcatttgaactactattggctactgcgtctgtacagataatgctgattggttaatgcactagagtaattacgaagtgtaaagtattttattctgcaactaccaaactattccagtaagagcctttataaacatatcaagacaattatggaaagtgttgagggaaataggtaataatcaggagaatgtaccaagtctggatgggtcagacacctgtttcacatacaagtcaagagccagatgaagtatgaaatgcacagaacatgccattttcttccctttctacttaaaatgaaactccatacatctctgaatgaatgtgctttctttaggcccatgagtttcaaaatgatcacttcacctacaaaatatgaacgttttgagcatggtgatgtatgcccacaatgctggcaatcaatagatttaggcaagatatcaccaaacccataccaatctagacaaaatattgagaaattgtctcaaaatgtcattcaaaatatagtaaaaatggggtgactgaattcaatacttcaattttgctaattaattaatgactttaatttaattgacaccatgtctgaggtttgtattagggttattctgagaaaatctaggaaaaaaagagaaggggaaaaaaagcatgcttgtgcatatgcacaaattccaaacactattctctccaacacctatcacaaaaacaaattaaacaaagccttattacttgcccagcagcaaagatatttggttcacatatttgagagttgtggagatggcatttaagcccacagatactggatacagagaagtgatttagaaaaattaccatacaattgaatttttctatggttatagaaagggataactgtggctccttttcattcagtggtcatttggtagttagtctggtattcagattacagagtcacctctgaaattacttaaatataaagaaatgggaaagtgctgtataagtggcttcatcaaacaaatccaacatgtgtgtagacaccagaggatgattttgcggtatcatttctttattttctacctaagacagagcctcttcccaattaagtgagctgagacagctggtcattgagcagcttgtctctgtatctcaattactgccatattcttgcacacatcctgctcttaaggaggttctggtcatcctgatttaggtttcaggattgcatgttaagatcttttacccacaagcctctctctaacccctcaatagttttctgagatcatagtaaagaaatattccagtgttaatagtccaggataaatgaataaattgtatttgatatcagattttaagatatagtaacttatgtgggaccatttattactatacatcctaataaatttaagaaattatttagcatatgaaaataaaataattaacatccaaaaacaaggaaagtaattcaaattaataaatacatttaacaagtctagtgaatgcaagttttttttaaaaaaatcatctacaagtctacatttctacaataaataattacaaaatatcacttacaaattattataagactcttaaaaacatcactgacaatagtaaattaaatacttagatgggaaatatgttgaaaaaatatatcagggattaaaatgaacaaatattattaagacttttcccaaaaagaagtgagatttgtcctctagtaaccctctttgaagctcttctcagctgaaaagttagagcaaacaaggcaaaatatgcctgtatgttctaggctgaaggccatggatatttctattttctgtactatgaaaaatttggatgttatccattgtgctgggagtgtgatacacacagctccatagaggcctaaacccaacagcttcagtcaaactcacagtccagaatctttaccatcctgccctattgtgatccatccattttgctttgttccacctatgtccagagaggcaaagaaactgcattcgcaatcacctgctctgattgaagattcatgggtggaaaaggaagaaatatggatttattggcttaagccactaaattccagtgtaagttcttaaggaaactagatgtaatcatggcttagaggagtagacatttcaacacatcagtttcctccacattgttctgtagacttacagaaatctcagatcaaggttacagacaaggaaacaaagaatacatgtgatggcagtccatactttcagtgtttaaagctggtcagaataaatgtatgggcttataattacagtgctggttactggcatcattggtatgtgagggtcattttgggaaaaccaaaacatatctccttcctgggcagaaatatttgtttggtaatttggatgctgtttgcaataatatatttgctgttagaagattaaactgaatgtgaacaaattgaatttatttatgtttgtttacttaatatttactaaatgtttgctcagtttaaaaaccacagagaagcattcaaaacaaaagaaaacattatttaacatgtccctggttcaattggactggggaggcaaatacctttaatcaaatcacttaggaggcaaaggcaggcagaactctgtaaatcccaggacagccaggactgcacagagaaacctgtgtcaaaaagaaaaaggaaaagaaaagaatttcaggcatacttctactgtggaatatgcagatatgcaattagttatatatttttcctgtcaacatacaagaagcaaatttgagtgaacaagaaaatgctgaggtactgtccaaaccaaaatggagctatgtaggcaaatgaacgaatgtagtgtgttgccagatgtggggttctggtatgccagaagcatggtaagtgatcactaagaaaagcaaaatggaccgtcagtgctataggtgcctaccaccatattgacaacctgtcagttctgtccctgggaataacaagatggagggaaagaacctactcccacaaattgttccatgacctctacacatgagttcctacactacatgaagacttaaacatacatttaaaaaccatggaatttatctactttatttttaaactactttattaaaataaaatgttactatcattatagtaattgcagcaaatccatcacattaatctaagctgttcataatagagacaattttctgtagtacaaattggaaatctcttggaaactaaaaaacaaacaaaaattcaacaaaccataacatttataaagttctttcaattctaggtttgacttagaaaaccctaaaatgcactcaaagtactttcttgaaaattaaatgttatagtcttctataattttcacaaatggaggaaattggcaatgctgtgtgtttttgagtaagtgtcagcctgctgattaatgctggtttgatttttttccccactgtccagagaagtcagaataattataagtttagaacaaaatcatcaattttgagataaagttaaatttcaaaacaattgttgctgtgaaggtaattacattcatccttactttgatggtgaaattcaccagcatatgaataatacacaggaatggacacatgaagttcaattcaaacagtcaaaataaaaccttccttccagagcagcggaggcaagaaccaggctgctgtttttagccacatcatgaactccaagactatagaaagacagaggttggatattaggtttgagattagataaaggatgctaagagcatgcctagctggggctttcattttcatggctagaaagcagggggtggggagctgtgggcaggacattgggaactagcacatgttgtgtgactggtcattcagaaagagctggggagtgagatgccggtaaaacaccccttgtgaagctaccctgagaagtccgaggaagagaaaccgtgattctaggggatatatcttcctgttattaccttcctcttactatcctaatgttgtcttcatttttaggtgacaactaacagtcgaccccctacatacacagccaacataaaaacgcaagcacagggagtctccacctccttcaacaatgaatctgctttaagttgcaaactcatacccctacccccagtcccaccatatgtgcttatgcataattcatacaacatagaataaaggcactgcaagtaagttatccttgtgttcatttcatgaactttatttgagtcattttcacttccttctaaaacatcttatggcaaaattaaatatggagattacagtacacagacattagtttgaactcatactattcttacagggaagaaatttaactcgcaaacaaggcagggcttgcaattcacttccttattgtcaatagaatatttctctgtaattgggtttttcaaaaggattttgaacaaatatctacatcacataaacgctcaaagaagaccgtatcttcaagagaagaggtatatgcatgatgtcacgttgtctggagagacaaactggagggtggttaatcttcaggacttgtgtttccccttaaaaacagatattattcaaacaagacagtgttttgttttaaaaactttgaattgtcaagaatactttttgtagcatttatttaatattcaaagaaatctctgccatattcaaaccgtaaattttgattatttgaccataaatattttgaaaattcctataaatcgtcatgtaaaattacttttaaatttaaaacaaaaatcattaatagttagaaattatatcattggtagtacaaatttgtacttttaaaaatacactttattaagattaaaaattttggattaccaaagcaattattaaatgcagaaggcaagcacaacttgccatctattactttagaaaaataaacagtgaaatattccaatgaaattcttccctaagaatgatttttacacagaagatactgagtgcaaatgttctagtgaggaaacatacataattgtagctctcaggctcatcatatagtgcaatgtttatgccactaagcctgcctttaatctagacttctgcattcttccatttgtgaccaaatgatattgctttgttcccacatacagttaaatgtttgcataaaatgtaaagagaactaaatatggtaattaagagtgagtagatgtagtaaacaaatctactaatcacatattcatgcatggattataaccaaacacacagccatgaaacaatagtaatgccatccatagcaacttctcatggatggcctcaagctgtttcaactgcttctgaagtgtctgaatttttgacatttatcattgaattgtaaagaccatcatactttttactattgagatcacacttacattccacttgttctcagcataataacaaggtattgtaaaaagtgatgaaatttggggattgatttttatcttttgagctgaattactcaaaaatttggccaaatcttgcagggtctttaaatgatatgcaatgtattctctacttatatattggaaattacaaggacatggttatctgttgttttagttatcttccttttaattgtcatgtgattgaagtaatagagtgcacttgtgagaccccaaaacatttgtggcctagccatatatatttaataactccattgactattatgccataatattttcatctataaaatgagtaaatactatactactataactaaagaaagtaacataatccaatggtgttagaatggaagaaatgaaattatcttattgaagacatccttatctaatgagaatccctctgacaatctacaaaaaaaactaaatactgtaataaaagttgaattggtaatatcacaatatcaatgaactgatcccaaatttgtttctataatctagtaacaaacaattaaaattattgatttttattaataaataataggtagtgtaaaacaatgatgaaatttacaaataaaaggactactatacctgggtgcccaaaacaacaaaaacaaaataatcatttgttaaagaagtcaaagatgatctaaacagtgaatctaaatatggttgtcattgtttaaaaagactatattgctccttcattccaaacattccataaatgatatgaattgaagtaaattacaaggtttacaatatgcagatttcaaacacaagattgtttgcagttgtttggaaggatatgaattggaagcaccacacattttccacatcttcacaaatctgaaatgaagtgtagaaattttcagatgaaatccagaaatattgaggataaatatgagaagcatacaatgaatataaacataaggcatgagcaaaaatattaaggaaaagagtgatgtatcttccaacccagcaggacttttgataaaagaaaagggaaagtactgttggactcacagtttttcaccttggatacagcaaacataaagctcggcatgggggacttgtgatctgtacagcatgctgacactggctagacaatcagctctcctcgaaaactctctgatgctgggatcaggagtcatcttaaaaggaagccttgcagtaaaacttggaaatgaaaaaataatcagccaaacatatgttgcaacacattgcccatagataagatcaaagagaaaaatataatattggagactgaagcaaggatgagatattggttacatttaaggtatagtaaacaaaggcacagaccaggtggttctggtgtcccatcagactgtcagatgcaagaattcagctttgactacacaatggatttcagatgaagagcacctgatgctactcaaggaaactagaaaataaaggataaaaaaaatgaaaagaactgtcttacccatgtggtgcactgcaaaagaccaaatccagccacccaaggaggtagaataaaatggacttggatgggagataccaaaagaattttcttactaaataatgtagacaatttcccaaatttagagaaagatgctgacatgcaattggaggcaggaagtctttcagaccccccactcagacatgaccagaaaataaatatttccttatcacattgaattataattgaaattcaaataattcagaggagtaggtatttaaagctacaatcatgaagcagtaacttaggggggaaaattctcaagtttataacagatctatccactgaaatgctaaatttgagaaacccaggtaatcatctctagagattatcttttgaaatggaccacaaaatgaaggcgtcccagcaacagccttaagtaagtaatgcctggccagcaatttaacatgatggatcacacttcaaggaatcctacgtggataataaatataaccagagaacatgggaagaccaatttacataagaaaaatggataaacaattggtggctttggagtaatgaagtatgttcaaattggtaggcaaacaaactcctaatgtagaagggagaaggagaagaaaaccttactcaaaatcatgggagaagtgaaagataattccaggaagcagcacatatctccaagtattaacaataaattcaactcaccctacatatccaaatcaaacaacagagtggagaactagaattaacaaaaaaagcaaagatccacagtctagagagatggcatcttataaaccacttgttgctcttgcaaagaacctgggttcagttcttagcacctacatggaagtttaacaacccctgtaactctagccccatatattcaatgcacttctggcatcaaagactcatgcatgtatatggtatacataaacgcatgcaagcacttttgaatacttttatttgaataataaaaatatcgaaaacaagatgcatctacttgctatcactaaaagacttgacaggatttgatatatcaacatgctttgtcttttgttcagtgtacatcatgaagtgagggaagaaagaaatgtaaaaaccaaagtataaagataacattgcagtgtgataaaggaacaggattctaaggctccccatacgtagcagaggaggtattggcagatgatgcccactgagaaagggatagtcatttttatttggagatgaggttcatgacagggtgcccaggacccagtggatgtcctaaatcgatgcatagctgggcagcagtaactgagcacaggtagatattgatgataaagaggaatgcatataatcaaaatgcattctacacatttatgcaattttctatgaataagtagaaatagtattattcaaaataattacatgagtcataaagtataattactcactataatgtttaagtttttaaacatcgatcagctaagtattcacaaatgtttggtttgcatcatccacattctagaagatatcatacgcaacttgcaaaaaaattatctcatctgaactgcatagcaaacacacacaacagttttagtgagaaatagagtataattggaatattgtagaaacttctgcgggaaaatggagaatgagctaagaaaagagtgatagatgaaacagttgacaacagaaaaccatattcagggagaaactgacaattcattttcaaagagcaagcaaattccaagaaatagcatggttatggacactcatcttgataaaacaattgacatcaagtgccctgttaagggtcttgcagtcttacttcttgaggcaattccaggaacttaagccagggaacagtcagcatggctattcaccatgaaaatgtgtttgcgaaattagaagttgactaagcgtttacaattcatttttataaccttaaatagcaagaaagagttttatcttatacaggttcttgaaatgatcttagagcattttctcacagtaaacatatttgttatgtattttgcagagagtaaatccatggctcaatctttaaaagattataacattaaatctaatattaacaaatgatttctctggttaacctcaaagtgtttcagaaatcctggacaatcccacagtttaaccttcaaagaacaaagcttcatcattggtggcatttttttattatccaaatttgcttttatgacaagtgtttcctaaaaacagtcatttcaaacaccaaattaacacaaatgtttacaatcttgcaaaaccatggatagctgtgtgctttgccaagagtcccacatgacagtggccactaagtcttggggagatggaggtaatgtttagagaaactggaggagtgcagatagaacaaatcccacaaggatagaaatactgcatctataaatcaacatagtggtcatgtttctccatggatatttcctgcacaatttgtttttcttccctatagcttcatttcaaaagtaacagagaaaagtaacttgacttctacacaaaactatgaagtaaagagaggccatgtatatctaaggccttccctggcagtgaacacatttttgaaggaagctttgctgagatttgatgtgatatttgtagagtttctgcttaaataccaactgaagttcaaaagtagctttgaaaaatcaatatctgttgaaagcattagtcataacttctcattttcgtggttttcttctggaaaatagtacctcattatttcatatttcacatgacaaatgtttcgaaggcattttccttaatcacttgtgaaaagagtgtaactgtatattttgtaatcctacatatatttaagaaaagaaattaaaaatatatattcagaataactgtcatttccctgtaatgatgctgaaaatgatttagtgtgattcatcacatcacaactcaagtctgtttaaagattaccaccgtacctacaccacaagtagccacccaaatagtatataatgtattacttcatttcattttcccctaaatattggtttcctcctccagtaccaatccatattccttttaattcttagagtcctcattagtaagccaaaccccattctagcagagtttagtgtatttttataaaactatgcaaacttgctgctaaattacaaagttactgaagttagaaatccagtagacatttgtatattaaactatctcagtcttttgggtccatgttgttggtttaggtttggcatcatgttcccataaaacagacatctaccaactttaggattctaatgttactcagactgcagattgcttagcaatatgtgcatataattacccagacacaaaagccagtaccttatgaggcccttcaggaattatctgtaattcaacttagttgttaaacagggttgcttctcctttacatggaggagtagctagttcaccataattatagacccaccatagacaaataccaaacgtgtgacaggaaacatagcctaagatttctgtgtaggcaggttgatacttaagtacaaactaaattcctagaactccatagtgtgcttaatacttttgtggagtatcagtgaaaatgagagaagcaaagaaatgccacatgaatgaagtgtttcaaggttctaccatttagactgcacagatttgttcctggtacacataatatgattagggtaaatttgacaaatttaaaaataattttttactgttggtaattagaacatttatgaaattttggttgcattttaggactatcaaatgatcttaatagcttatgctcttttaaaagtgcaatacttgcttttagtttttaatacaattttaaatttattttactagtttattgaaaatttcccctttcctctgctgctggaccaatgagtttagttatcattatttaaagacttatgggccaattataagtaggtttgtatttattatgtaacggaactatgatttaagagaaataaacatcataaatcttaagatagccagtgtggtataacagttttagatgtgactaaaatagaaaaaactaggttaaatccacttccagagtttgtagttattaccttgatccctcagggcactgatccactagggacctatattctacctttagtatgtggatttctcttttgtctgtaatcttgatgaagacccagatagatgtatgataattaagtcaatgtgttattatagaataaatccatgaggtcatattaatgtctgtggcccatgctgccagcaaggatcatgtttgggtctgtggtcctgatgctactgtgtgccatgttcatgtcattggcaggtgttatcactgaaagttagatagatgtcctttgtctatgctgcttcctgaagccatgacgatatcagtggtttgtgctgctctgacaaaccttattgatgtctctggcctgtgatgctaccgaagagcatgatggtgtctgtagtcaatgttgcatacagggtccttgtggatttgaatgaacctgtgtttgccacctgagaccatgttgatatttatgggcagtttgccagtggggaccatatttgtgtccatctgctttgtttccccagaggccatgtgtatatccttgtcctgtgccaatgccaacagctttgatggtgtctatggcccttctgcagtagagaaatgtattaagtgttgatgtccatggtctgtaccaccacctgagaccatgctggaatctatagcatgtgttaatgccacagaccatatggatgtctacggtcccagctttcactgaaaaccatgtggaagtctatgatctgtgctcccacagactgtaaagggcaatgaagctacttttgccatgttattgatgagtgcagactcacatttaggaaaaagtgacatgaaagacttctgtgacaatctatattcccttatcaccaaaagtaacagtctagacaggaagccatcaaagagaactgtcaaaaattgtgatgaggatactgaagtgtataactccacaactgggggcatcttgcagggtacaggtgggagaggactcagttttcttttagagactggctactggcattttgatgatgtttgagtcaatatatgggcaacagaaattggacttgtgttttgtttttttttcttctccttttgagggctatgttataagggtgagggtggacctttgagaactgagaagtgagcatgatcagggtgcatggtgcaaatttcccaagtaatcaataaaaatattaaattagaaaaaaatgaaagtaagtccaaccaaataaggggccttttctttccaaagggggtaaaagttatggatagaacagattaatttcacacaaatgagcactaacttgtagcatttcactgccacacaaaatacactacacatgtgcaaacacacatatatacactcacatacatattcacatacacatacatattcacacacctataggcttacaaacataccacacactaaacacacacacacacacacacacacacacacacacacacacacacactttacgatttttgttttaaacataccacatagtaaaatctatccttctaaagtttacaattcaacattaaataaacacatactgttgcacaggtgtacatgcactatacaggaatgcatacatagaatgagaacccctgaatgaagattgtgaatttaggttaactatgttgggggcaggttcttttggcttatttacattttgtatatccaataaatcagagtatttattcctacttttgaaatattactgatggttaaaatattaacaaaactttaatacaagaatatataaatacaccctagaaattgtagtaaagatgaaaccatcaatattttctataaaacatatggataatatatactaatatggcccattaaaaagtgttaacagttatgtatgaaaatactatcctagagatgaccataaaaaaatcactctatacaaaatatccaagtatatgtgaatatttttagtcttgaagctgtagcatttgtagacaagaaaattcatggaggtataaagaaaaatgtgataatgaaatttgcaggtaaatggattaatgagaacagtattatactaagtatggtaagcccaactcagaaagaaaaatgcaatacactctctgtcctatgcagatcttagttttgaatatttaaatatgtgtgctgacacaaatccaagctctcacctcaaatgggataagagataatatatgactatagccttggaacacagattcatgttatctctaattccctgtccataggtgccttggttagggtttctattgctaccatgaaacaccatgaccaaaaagcaagtgtgggaggaaagagtttatttttagactttcacttcaccattacttttcatcactgaagaaagtcaggacatggaagtcaaacagggaaagacctgatgaaaagaccctggaggggagcttttgtttggtttgtttaactcatcttcttatagaacccaggaccatgggctggggcctctgtcattaatcattaaatgaggaaatgccttacaactggatctcatgaaggtatttcctctactgaggctccttcttctgatgactgtagcttgtgtcaagttgacacacaaaaccaccaaatacatgaggtgaatcgaatttggtaaagtttttagtataacagatcaaagaaattaatgtaaaaatcaccctccaaatacttcagtgggaaacctctgccactgcactttactggtaatattcttggagtttcatttcataagaatgttagaccaggtacaaggtagacaagcaaggctgttaaatggggtacagatagctcaaaataagacaattaggctgtggagctgcaacaatgcaacttctccacagtcactgaagctctaatcagtgagtcagaaagtagagtataaggtgatttttttttacagtgtgtgtgtgtgtgtatgtatgagagagagagagagagagggagagagggagagagagagagagagagagagagagagagagagagagagagagagatgtgatgtatgtatgtgtgtgtaagctttgaaattaaaagagatcacgagaaggaagaatgagatattgaaaagcctgacactttctttggttgattaaaaaataaataaatgcagaatattactcagacaaataaaagatcagtaggttagtaacatttttgtcagttcctgcaatatgaggaggtgtctcttatcaacatattatatttagcttgatttttcctttggcttttgatatttaggtatttatatttgatttttatagtaaataatttcaactcatggaaaatgtcatctactaatctttccacagtaattttagagtacattaaagttgaaaagtatttgtgagacgtattgcttttccttacaatttaccttattttaaatatttgtttttccaatttttgaatgtcacatgatattgtacatatttctgaaatactgaggattgcttaatgcttatctagtttatataatgaccaaatcagagtaattcatatttgcatcttctcacacattttacacttctctctttagggaccttcacacccctccaggtatttctatatgtacgctaagtcatagcagattatgcttcctattcttcagaattgtaaacaccattttttgtatagaattgtattttggtagccattatccatcttcctcctcttctcctactcttttctgtactgtataaacactattttattattttataatatgagaacactttctgtgcatctacaaatctttagaaacagaaagtactctggtatgcttcatgatataggaaataccatttatattctttttcatttttctatgagacttgggtggatgtgcagctcagaggcaatgaacaaggatgaacttatgactgttattttccaagatgtatctactatcaaacggccttctgaattcatacccctctgcctgaagcttagcacaactttcagaccttatcagagacatttctttgtgcagtaaagactggttattagaaactaacaactgttccaaatgcagaaaagaagtaaatgtggagtgtttagcaacaaattagacattgacatcattacactcacaccagaggctcagggtccaatgcagaagaggagacagggagattgcaaaagtcagaagtcatggaggaatggaacaaaacagtgtattctgcactcatgaactctcagcagttgtggttgcctgcataagatctgcacaaggacaagccaataaatgttctattatggagtggaaggcattcacccctaacttagaagcaatggagagtagatgtcttctggagagggagtcagttttcttacaggatgtgactcctgagaggtgtaccatatgctggtacatggctccatacctatgagtatatgaacagcacaaattggagtatatgggtaaatgaaaaagaaagcacaaagttgaggggtagggtgataagggcagatattacagtgcttaaagggggagttagcagtgaatatgatcaaaacatatagtatgaaatcctcaaagaattaataaagcacagtttaaaacaaatcatcctgtaaaaattaataaatatctgacataaaagaaaacgggagtattggaatgatattgctcatgagacttcattgttaccagtacatattcttgtacttttcctctatcacttgttttttgttactctgtgttgttcctctgtcattcctccaaatcaatttagaattagtgaacataaaaccatccatcttctttgtaatacaaagagtgtaattatttgtctattgtacttgtttgaccagtgacaacttcatccttgctactatttccatgaatggttatctggccatctgtaacctatgaaaaacccagggactcttcacactgcttcttattggtttatacactaagggttttatgtatgcatcagaaaacagcattttttttaaattctatgtagttaatcaccttttctttgatgaactgctgattcttttcctattttgctctggtatttactttaacaccataatgccagctctcttttgaggtttaactttccatgggctgaatctgttgtctccatttccttcatgtttatggtagctattatgctaaggatatctactcctataggaaagtgaaagactttcatgaaagccatgttccatgaaaacagtcactattttcaaggaactctcatcagtctgaacttcaggggccagtagatcttaagaacaggaaatacagcttctgtgttctatgctgttatgagccccatgttaagcccacttaattactgcctaagaaactaagatgtgactgatgccctaaaacccacaggaaacaaatatttctagtgaagtacttgaccttaatgttaatgtggttcaaccagaaagaccagtgagtattaggaaatgtagcaagtgtttagggcacacaaatgcattactttttccaatagcattttataataacaccaaattattaaagaaatatcttattttctgatgttctgaattaaagtcaggaactctcacacccacatctgtgcactaccagcaaactaaaacccaaggtcaagtaaacaggcttctaatgtgtgtgttgctcaaagacgaaagacaaaaaaaaatccagaaataggtcagtgtccctcatcatggagacatgggtgtgggggcactccctgccagtatgctctagtctgttagcagtcccagagttgtctgtgatgattttcctctgactgcattctttatccctctgatggagaatatgctcttgagttcattcattcctcacgggaatgaatttttgtcagataaatgatcactgtcaccaatgaagccttctttccttacattaccaatgaaacgtaagctcactcttaccttaggctcatgactaaggatagttgtgtcaatattaaagactttaaaatatattttatttaataaattatgaaaggtgtctttaagttcatggcttggggacccttgaattatggtggtgaagaaattacaacagggccaggagtcccttggtaacactgcatcagtagtcaggatgcagagggaggatagccagtgcccagagtaatttcttcatctcatacagctgaggagaatatatcataaaatagagccacacaggtagatccttcaattcttccatttaccacataagcatgcccagaattttcctgcaaggtaattctaaatcctataaagtcagcaattgatggtaacaaataatcagtaggactagttgttatttatcaactatttctactctgaccaacattgtgctgggccctcagtattaaaagtgtaagcaatctgacattccttttccagataaactttcaactcaggagaagacagagaccacacatgaaacatacaaataactaaaattggctttggcttacctataaataatgagcgttagagatttggtttgaaaatcataacatctgctcaatggataaacatgcttttattgtaagagtcttacatggaaagtatcttatttgcccatgttttcttgaagaaagagttcatgttttctgcacaatgtgtgattttccattatattgatatggtttaatttaaaaaaaaagtattctctctaacacagtttaatacctagtcacattttaaaaataatggctttaataagttagcactattttcattgaaggtgattcccttaatttacttttcctttaaaaagattatggagatcttctccctttccccttctcccggcgaccatgtatgtctgtctctcttagggtcctccttgtttcctagcttttctggtggtgtggattgtaggctggtaatcctttgctctatgtctaaaattcatatatgagtaagtacataccatatctgtccttttgagattgatgactaccttatatttcatcctagagccttcatccagtagctgatggaagcagaagcagtcacccacagctaaacactgatccagactcctataaactagttgcagagatggaggaatgatgagcaaaggggtcaagatcaggatggagaaacccacagaaacagctgacctgaacaagggggagctcatggaccccagactgatacctgggaaaccagcataggaccgacccagacccccagatcatgggtatcagttaggaggcctgggcaatctatgggccctctggcagtggatcagtatttatccctagtatacaaatgaactttgggatcccattccacatatagggatagtctctcagcgtagacacatgggggaggaccagggccctgctccaaatatgacagaatttaaagatcccccatggaagtccacaccctccctgtagagcagagaggggatgggatagagggttggtgaggcttgggggaggaggcgagtgagattgacctgggattaaaatgtaaaacaaacttgtttctaatttaaataaaaaaaatctgaaaaaaattatggagaaatcactccgacttctctgaatacatctttttatgtttgactcagatggatactattgtttattgggaattgagtatctacttggtaaaggacaatcacagagattctccctaccaatgtaaatttaatttgctgttcctactgtttatgccaacccttccatagactctcagttctcaaaaaagcattaaatgataacaccaaggatgtggtgaagatagagcttcttccacattggttagatcgcaggaaatgggttctggacaccctgtggaggctcctgagtgttgcacattaaggtctcatctaagcacagcatcaggtcccatcatcacaatcattttcaagaggagagatatcaaatgtcgcaagtagcatttagctgcagaagcagagggatattagggaagatcatcaacattaacacatgtcaggaatgtaacgggattcacaggagtcatgaaccagagataattgcccccaaattacatttcttatgtgcatgaggcagtaacaatgggaaaacaactagaaattcagatagcatgactaatcttgcacctgtccaccatagaaataaacagactgaaagatctcagaagtcacagagaaaaaagaaagctgacaaaaaaattaaactggtatttttgtaaagaaaaaaaaagaacatgtgtatatttccttactgtgatctgaagttgaatgttaatatatgtcttcatccatatatattctccagcacagacatatgtagatagataatatctgacaacactaaggaaaacaagagacacatataattaaatgcattcctaattatcaatcaaacaaaatataatattgtaaactgttttaaaggatttcaatcaggacaacagtggcatacacctttagtcccagcacttgagagacaggcaggtggatctctgagttccaggccattctggtctatagagcaagttccatgatagccaaggctacacatagaggaacctgttttgaaaaacaaatgaacaaagaataaataatttaatatgaagcttaaagatgttgagaataaattgaattgactgttgtaattacttcacaggcataactcccattctgaaataaacaaatagaatggccatgttatttagcgactaccctataatttattgtttacttatgaatgtactgtgacacttgtggtttcaaaatgcaaaattcctaattgagagaaattttatcttatttagtgaatactgtgattatgttttaaaagaacctagtgagagcatatggaccccagtcataaagctggggaaccagcattggactgaaccaaaccctctgaatgcaggtaccagctaagaggcctgggcaggctatgggacctctaacattggaaccagtatttatccctagtgcaaaaatggacaccaggagcccattccctatagagggaaaatatttcaacccagacacaagaaggagggcctatgccttcccccaaatgatgtgacttactttaatgatcccccatgaaagtcctcaccatcctgggtgagtgagttgggggtgggctgtgggggttggtagcaggcatgggaggatgggtgggagagggaatgggggattgatatgtgaaatgattgtttctaaattaaaaaagaatttagtatgttctgaatttataaacttcaatatccctttggagaaacacacatatgtatgcaggcataagtatacacacatacacacacatacacacacacacacacacacacacacactaaaacaagtatttcatatgacacattgagtgaatggtttcaggcttacaattttgtttaaataattgatattttgtgggttgctttttatttctaacttaagaaatttaattctccaacattattaatgaataggtgttttttagtgttttaagaaacagaatgtaggatggtttgttaggtaataaaaagatgtactatgatttggaataatttttgcatataaatataaaagtgatgacaaggaacacaaaagattggatatgatagtagctcaataaatgaagtgctcatgaggaccagagtttgatcccaggtcccatgtgaataaccaattatggcaaagtgcttgttatccctgaattggggaaggagagagaataacccctcaggcttactgcctatcctggaatactgggtgagcttctatcttataggaatgtttgtcaaagtaaacaattaagcaaatatacataaagttgacatagattaacttgtgtgaaatacaaatacatattgaaatgtggcattctagttatttccttgaaatagttttgcagagactaattgaagccacaatcttgtcaagtagaactacattttcaatatgaaacatcatggaaaacaggttcttgccatataatttacattttaagaatttacttcacaatcacaggacaaattaataaattcattgtattgtcaaaaaaattccaaaatatttacaaccagtgtctacacattgcagtttagagaaactaagaatggataaagtttgttacgataaatatttctgccaaaagccgccgagccccactgccacatgtactctttacgcaagctgcgtaaatgaatacacagaaagacttgtattagttcttgttcaaagctgcttggccaatgactaggattcctcatctgttagctcagtcttaattatcataaatcgatatattttataagacttatcttattggatgctttattggcgtccctccttcccagtggctcacatcctgcctctggaggaggcaaaggggaaaagggacccttcctgtgtcttcttcacttaaatatgagtatccttgctatgtcacttcctgcctggatcaccacttctctactgcatttcccagaatcctctttgactcctagtcctgtctaacttgcgatctcattggccaaacagtattttatttaacaatcaataagataaacataaacagaagtacttcccccatcaaaagttgtcttatggcactataacaagattacctaaactgagattattgtgtctacactgtttgctccgagccattcatgcttaaccactatgctgcagaggttttttcaaagtatgcttgaaattaccaagcagaatgacgtacatgcatacacatagaagctgttattctggattttcagaaacctctatctaatgaatgcagtatcaaatatttatgaagttcttgaactgatgaattgtctgtggtgaagcactcagataggatcagggatgcgagattaaccattctttcagggattttcttgtgtaaggcattcagttacctttggcctcacttagcacaaggaaagaggttgcaaaatgacagggagttattgtagaaacacccttagaatgctgattatgataaaatagctttatgtacaggataacataatgaaggttcattccttcccttggtttcaggatagggactcaagatcttaccaccttgctgtgggaacttggttggcatttatcttgctgccatgcatgtgcatatgaaaaattttagctctgtgcaccatggtaagtgtttttcctaaagtaactttctaagacacagaacacagaatagggtactttcttaaacttctaaagctgactctatgccatgtttaagctaatctgtgaataaagaccagcaagacttctgctataatctgatctcagagaaggcagcaagttcacccagctatatattgaagatcctaaacccaccagcagctctggtttgagttggatttgcattttttcaggaaattaacatgaggcaagcccttgtctttgatctcaatacctctaatgtgccatttaccacaggacattcagcagtgtttacaatgacctacaaagtttgtctaaatttcaccccaatgtataccttgagactaatttctcctgatgcacacaccaaagtaaaattatattgagtcacctaaattagaatttttttattcactctatttctccacatcatttcttccacttgaggagtccctcctttcgtaaagtatgagaaggaaacatcctcaccatttaaattggggttgaggtgttccttgactgcttgatgtacccactgagaaggatgaggcaggtctttcacactcctgtcttattacttgtgatctacaccagattccatatagcacatacttgtatgcattttaatttcaacaattctgtaagatgctattcattttgtggggcatataaaaggtgacatcaaaatatgcatcatcataagaagttcagacagttcagtttgttggtcaaaactaattaattaaacaaaaatcaaaattgatccttaaggtaacaattaggctttgcttaacagatctctttagaattctcaatggtggaatctcaaatggttgaaagacacataagaaagtgtgaaacatccttagccatcaaggaaatgcaaatcaaaacaactctgagataccatcttactcctgtcagaatggctaaaataataaacaccaatgacagttaatgctggaaaggatgtgcagaaaggggaacactcctccattgctggtgggaatgccaactcatgaaaccattttggaaatcagtatggcagttcctcaagaaaatgggaatcagtctaccaaaagatccagcaattccactcttaggcatatacccaaaaaatgcacatttatacaacaaggacatcagttcaaccttgttcatagcagcattatttgtaatagccagaacctggaagcaacctagatgccccccaactgaagaatggatggagaaattgtggtacatttacacattggagtactactcagtggggaaaaaaaaaaaaacaataaatcttgaaactctaaggcaaatggatggaacttgaagaaaccatcctgattgaggtaacccagtcaccaaaagacaaaaatagtatgtactcactcatatatggattttagacatacagcaaaggagtaccagcttacaatacacatcgccagagaagctaggaaacaagatggacccttaacgtgacatggatggtcccccagttgagactaaagggacaagatcagctaagctaattgggaccatgggggaggggagagggagctagaagaaagagagggggagaagagaagtggagaggaggacatgaaagaggaagatttagtcaggggaaggattgaggagaacaagaaaaaagatacaacaatagaggaagccattataagtttaaagagaattctggcactagggaaatgtccagagatctatgagtttgacaccaactaacaatctaagcattggttgagaggctaccttaagtgcccttctccgatgagattgatgacaaccttatacaccatcctaaagccttccttcattagctgatggaagcagaggcagacacccacagctaaacactgagctgaactctttaatccagttgcagagagggaggagtgatgagaaaaattggtcagaaccagactgaaaaaaaaaccacagggacagctgacctgaacaaggggttgctcatggaccccagactgatccagaggccctgaacatggatgtcagtgaggaggcctcagcaatttatggggcctctggtagtaaacaagtatttatccatagtatacaaatggactttgggcacccattccacatagagggacactctctcaacctagacacatggggagggcctaggcccttcttcaaatgatgtgacagaatttgaagattcccccatggaaggcctctacctccttggggaacagaaaggggttgggatagggggtagggagagggaactgggattgacatgtaaaagaaggttgtttctaataaaaataattctctttaatataaattacttatagactgcaaggtttttctttttctcattgttcctaggtacaaaataatgacaaagtagacaaagcaaccacccaattgaaacaaaatacattagcaagtgcattgtagaatctagaaaatccttttaaatgtagtatacttggaaaagtatttttggattgatataaatataatagcagaatattgaataacaaccttcattatttagattctttttaggaaattctcttaagagttaccttaagtaatcttatagcccatatttcttactaattttaatagtttatattgctttatcatgccttcatattgttttaatacttattttctcacacttatattagacttaattttaaatgtccattatcaagttgaattgttcatgggaatattccattgactactatgactatgatgtgtactaatacaaacatcataacaccctcatttaacagtttgatttatatgaccacaggatactgctaataccagagttttcccaatgagaatagtagagttattacagatttttgcaatgtagacaaaagagtctgtaacagaggtgtatgctctggaacagttttataagtcttcatttaaactctgataaggcattatatcttcaacggagaaagaaaagaagtgcaacaaagaacttcagagagagatcagacattctgtcttggtcacttggtcacggggaatttaatgtgatagggagacatttaagtagagatgtctagcagacagaaaaagataagagaccagacagaaataaagaggccagaaacaagatatacctcactatcagcacagacagagagctgtggggaaatgagacatctgtgattatagtgagttcaaaaagctgtgaaaagtccaaggaacataaatgaccattggcatccatgaaacaggcatttgtggtcctaatatctatttatgcaaagccttcacctgcattatgcaagggtggtaatgtaggaagagagatgatcattgttatttggcagaactcagtagtctggccgattgattgaattgctgtgtgtttaataggatggaaacatctcctaaaacaccccagaccactaatcaagagacataatagaaatgaataaattggaataaaggttctactgcaattttctttattgatgcattctacttccccagcaaaaataaggcttcttcaggttgtctgtccattggagtctgcttctctaagcatgtacaatgtaagcaattggcaggactctatatttctgagaacatcctgtgtcaagtcatctaaacttctcaactataatagttacacaaaaactgatatgacaattaaatgctctagaaaaagaaattattaccattcacatcaattcattagtaagtaccaatatcatttgcatttggtagatgagaaatggggagaacagttaaagccaataataaatcccagaaatggcatttgaacctaaattgcatgttttcgtgtgtctgtgtctgctactgaatagcagttttctgaaagggagaataagtactggtaaatagtgcagtgtttaatttgcaatgaggattcatcttttataaaagtaaatactaaataggctttgtataataattatatagaataggcataaaagtacatagaacaaaggcttatctattagaactacgtgcatctgcaggaagcatctgccttgaaaatcaacatttatgtatgcatacagtgtttgtatatagttaacatttcagttaagatggcccacatatggtgatttgataagacatttataatgtaaatgaaatttttatcacctagtgacattttggccatctcaaaattgtgtgattcattacagatttaaacatacttatttcatttccagtttgttgtgagcctttttctgggaaaatgtgagaaatgtatgttttctctagatagggtactaaatctagaagaaataagtgcttctagccaagtgtagtttagtgaacctgtggtgattttatcatggttttaacaggagaatgggggagaagtttactcatagggccatgataactgacaggtatttgcactactcacagttccaccacaccaaagatgagaggtgcattgctggagcttcctacatgacctacatgcagctgtgctggtgagtgggtctcctctccctagtaattattactactgctataatctggttggcaggtggaaagagcttatgattattacatgttttaagtacttcctgaagcttacaagatgcttccctcctaaaccttgtttcattttcttcctgtgtctgaatgagaaactctccagaatagaatattttcttcagagaaaattgctgcaaaaatatttcagtgaagatagcaaaataatgtacattttttgtgcagctcacctctccattgagtttgggtcaatacatcctgagatgtgcgcaaacctgcccagctgcacattctgagcagatgtctgtgtacattgttatgaaacaaacaatgcttatcaatgttatcatctatacaatgtataggtgggaaagttacagaccatcatggacatatcaaggcaaattatagagtcctttctctttcaacaagatgaagaaacacacacacacacacacacacacacacacacacacacatttaaatttgtgtacgatttccaggaataattttaacaaggcatgcatttatatcaatcttaactgagggtcagagtaaccttgcagcagtatcttttttggtagaacaaggtagttatttcagatacaacatgacaattattttttatttatcagttattttagtttatgttttatgtgtacaaacattaattactgcttaaaacatctggaccctggtcagggtcatggaaaaaatcccaaatatgttgacaaagcaaagatgttgagggggttaggatgctgaggagtgtaaagcaaacacaaaatggaatcaggacaacatggggttacccttgtcatttcaatgatacagttgatggtgaagaatgttataagagctgtgcatgatcaaaagtctaggacactgaatactcacagtcactaatgattgacatgtacttgtaggtggagtccattgtcttgctccaatgggtacgtattaaaaatgcagactatcttgggaatatacaaaatggaatgaagctttatcaaagtgatttatagaaaacagtgagattgagaaaatattggcacttaaagaaaataaaacctaaaaaaataaaaaaagaaaataaaacctgagtgtatgcaggatttgtatactgtgatggaagaaactgaacaaaggctaaggtaattgctaagataattattatttctctaggcaatcacagactgaccaatggagaccaacatgttgtatgaatatccccatggcccaaacagggaaatgatcatagactgtttatgtggtgtctatatactgagtggtcaaagccctttgttagccatctttgatttgtcctttgtaaactttgtttgaccttacttgcctgttagctattacctctggctgctgttgttatcactgaccttgcaggtgtctcaatggtgtgtactaggcagtgtgttctttgtgcttatatttacattatcagggataattttatcatagcaacacaattatgaagccaaatattaaattactaacatggtaatttcccccaatttattgtatagttttcatgcaattccattaaaaacccatgagtgtctgtgtatatttacaggattatatatgtgtgtatgaatacatataaaccaatgctaaaattttgtatggcattacagagttctccctttacttcatgatatagccccatccttttgaactctcaaaggggtgagaatgcaggagacctgcatgagactgacatcattaatctaccaccatggaaagtggaagaagccaacacagactctagatttaaagtggtaaaggaagctactgggaagagtcaccttcattgttccctttctgtaagtaatctcaagaaagtcactatttcacaaatgagacttctgtggaagtgttgttttggtctgtttggttgtcccatctgtggtacataggcatttctctttctccaggaaaaaactcataaatcttttaaaatacagaagtccaagtgcttgtcttttacagtcaaacatggttaaagttgttcttctcaagatcaataacttgcaaaagctttatcagtgaagggttagggttaggggttaggttttgtgcttatgggttagagtttaggattagggtttgatttagcattccatttagtattagagttagggtttaggcttagagcttagctttaaggctacatctagtatttagatttagggttatgattagagttggttatggttagtttttgaattatttgagaattagggttagggtcataattatgatttgagttatagttaagtcagcagcttactgttgcagtttgaagcttaaaacaagagtggagttgtcccaacatgcaggatgccaacctggggcaagagagtcagggatagggaatggggacaagagttgcagaaacaacgacaacgagacagaattctgatcaagtggcaaactttacttttctcagactaggttatatagtcaggatattgggaggagcagaatggcttttttgtgtaccaggtgttagtataggcaggatattaggaagccacaaagaggatgtttggtaaagagttcatgagtaagaggtccaggaagggttgcctaggtgactgatcctgtgggtggaggactgggtcaagttgtttcttttcttgagctgaagttctaaatagctgctatgtaaaagttaactatgtggcctgccaagcatggcctaggatctcatgccaagccctgagatttggctcccagcatggagttaatataaaaactactcacaagtatactcctatctggaaactcttgcaaatgtaagttgataaaatattttttaatgaatgaaataatagaaaacagttgaatgcttttttaaaagtgaaggaaaacatgacatgatcaagaatatgagaaatacaagcatcaagtatgaattgcactaaaaataagcaaatgaggccaggtgttggtggcacaagcctttaatcccagcacttgggaggcagagacatgcaggtctctgtgagtttgaggccagcaaactctcgtctacagagtgagttccaggacaggttccaaagctacagagaaaccctgtctcaaaaaattaaataagcaaatattaaaaataatttggattaaagcacagtgtacaatatatagaaaaatacttttgcccttagaatggagaaagcctttttatcacagaatccattaaactaaaaccaaaaacttatagctggctaggaaacatctttcattgtcctcatatttcaggagaatacataacaggagaaaagcatgctaactaaaaatttggttgaaagagttttgaagaatataatatgcaaagacccattttataatattttgaagaaataaaaaaaataaagtgggacagtggagtaagcacaggaaatacagtggccaataatccctcaagaaattctgaattttaattctatgacataacagtaaattaaaatggaaatgtgagaagactacactaaatagactaaatggcattcacattttccagattccagttgttgaatattatttgggagaatgagaattgatatgctgttggaagttttatgaataaggatgaattataaaataataaaaataataataataataataataataataataataataataataataagcaatcaataacttggaagctacctccaattgacaaccactcccaaatgaaaaattagttttctccaagggagtctcactggggaaacagaacactctggagggaaggtgtcattcctacaagtagatggacaaaaccaataaactcagtgttatttttggaggttcttagtctcatactattttgtcaggtttctattgttattgtttgtttgttttgaactttacatgtcccatacaaatgtatcattatttccatagttcattcttttggttttttgaggcgcccaccatacagcacgcaaaaaaatacagaggcatattcttagttatgagtgacccacctgatctctgcttgtttctagccagcttttctcatctttaattaattcatttcccttttccctctgggcttctatcattcgtaactctgtatacttactttaactcttactctatggctggctgggtaactgggtgattagcccccaatatcctcttctcttgctccattcctcctcctcctcctcccttgtttctcctgctatttatactctctgccttccagccccacctatccttgcacctgcccattcagctctttattagactgtcagttatttcatataggcaatgaattacagcttcaaaaagttaaacaaatgcagcataaacaaaaatcacacatcttaaaataatattcaaccttagtttccacttttatgattttatgggatttttgtgtgtgcaaatatgtgtgtctccatgtctgtgtatttgacacttttctaggtttttttcttgtttttgtgctatgtatgtttgtttttatcttatcctgttattcttattatttttatatgcctgtttgtattctaatgagagagaaaaggaaagggtagatttgcatgggtggagaagtgaggcagacctgggtggagttggagaaaggaaaatcataatcagaatacatagcatgaaaaatatctattttgaacaaaattaagtgccactatcactataagtgttaaatattatattaatataaatgtcataaaatactagtttactctaatacttatcagaataattgagttacatattaatggcatatgcatattgtaaaatctgcattattgacattgtgcttgattaataagttcagaggtaaatggcaaagaaattggtctagcaatacaatattattgatgtttaaatctaccaactgaaagtctcttttggagcccataaaaatggcatcacttcaacttggcttgagatcagggagttcaaaactatccttactcttccaaggttaaagtcataagacctaaagatctaaggcatggcaactgtaggatgcttggtcttagaggtggatgtcttatctaaataagagactttgtcggaggtatggttattcttaacactcaaggccagataacgtgagatttggcctatggtgttaatatttggagaattaaagaagaaagtctgtttcttctctgtatcatgataaaaaaagtcctttgccatttctcccattttagtttgggtatataagaaagttaagaacaaacttgatacattcaatattcactgggtttcccttctgagtctattctgtgtctctgtcttttccttagtatcattacctgcattttcttaatccctactccctgtatcacatatgaactgggaaagttggctagatctgactgaagcctcacaaagtcgggtgtctagtactaacagaaagaagggttactataagtcatagcaatatagtagtcagtgtggcaagagaataaaggcactgttcaaaatccagttctcttgcaattgcatctatgatttcctatgagattcatattaaattttctttaaatgaaaattattatctgcagggtaatccagttggcaagatctatggtgtcattttattttgccaactcctctttatcatcgtagaaataaacatcggcttcataacatctaagatgttgtacttgggtcacacactcaaaattttctaggctaattaataaaatgtacagtgtggcaggatatagctgtaatatttataaatttagtattttatgaattacaatgaaaattctagtcttcaggttttggttccaagataacacaaaacagaagaaacaatgctagtgacaaaaaatataaaaaagctggggccatctgcaagcaattctgtgctttgaactatatccagtaagtccccatgataaaagccactaaaaaccctgtagaggctgatgctctcagggacatatccaaagcaagtgtttttgatgcttatgtgtttgacaaattctgtcaagctgcattactgcatgagctgtacaatttatagcatggaagtaaggaattgatattgttggctgagtgatggaaacccccaccatgacttaaaacagtggttctcagcctgtgggtcatgaactcttgggggtctcatatcagatatccatcttatcagatatttacattatgattcataacagtagctaaattacagttctgaaaaaacaataaataatatcatggttgtggttcacgacaacatgagtcatgttttactcatgttttacaacatgtattactgggtcatggcattacgaaggttcaaagccactcacttggatgctggtactacactacaacctacacaaaagcaacataaatatttgacaacatgaggaaagaagaaataaaaacatgttggaaggataaaatggatgttatgcttaaaaagaaaaagaatgaaattctataaatagagcgaattaagaacaaaattatatttccaataatgtcagaaagaatatatttctgactaatgtaataaaaagtgtgtagacatacatattgaaaattatagaatattattggaaaaatcaataaagatgtgcatatatagttagtaattttcacatataggctgacataatatcgtgggcaggggaaaatactcctcaaataaatctacatcattgatgaaatccttatcaaagtttcaaagtattgtggtaaaaagaaaacgctgacactaaatgtataaatgcaaaaaataccagtcaaaactaccttaaataaaaaacagtagctacatttatccattttaagttgttttacacattacagttatctatataaattttaacttgtataggggacaatagaattgagtaaatacaatcttgtccaaaagtaactgagacacttaaacaatatgttcctggcaagactgatgatgcctatcaatgggtcaataccaatggtcttgggacaacttgacctgtttttacaaaaggataatatcagatttctgttctgtattgtttacacaattacttaaaatgcatcaaggaactacatagaatttattgccataaaacttgtctcataagaatgtgaaccttctaatacagcataaaaaatcattataatgggaggccgggtgttggtggctcatgcttttaatccctgcacttgggaggcagaggcagaggcaggcggatctctgtgagttcaaggccagcctggtctccagagcaagtgccaggataggctccaaagctatacagagaaaccctgtctcgaaaaaccaaaaaaaaaaatcattataatggaataaaaagttcttaaattgataaaaatcaacaccacttgtttgtcaaaagatgctataagagagtagaaaactccctacacaatgagaaaaaagtctgaaaataaaatatcagctacacagcatgtagccatcaaaaaaggatctgtgggtaaaagtgtttgccaccaaattgttgacctaatgtggatctccagatccacattgctgaagaagaaaatagagtgcttcaagctgtcttctgaccttcacatgtgctctcaatacatttatacatgaataacacttgcagaataaatgcatgcagtaaagttaaaaaaatagataggtatctaatcctttcaatatgtggagaactgtagaaagtctactaaaaattagtattaatgcactttttttttatacaggtttctctttgtagctttgtagaccaggctgacctccaactcaagaaatctgcctgcctctgcctcccaagtgctgggattaaaggcatgtgccaccaacacctgacttactaacacactcttaaaagagatataagttgaataaacatttatctgaaggaaatatactcatatttaacacatccaagcaaagttgctcagtgtgattagccattagatacaagcaaagctgtcttaatttgttggtgaaaatggaaaatgctttatcaactttaaagacaacattgtggcatttttgtagaagagtcaatcagggattatcaaatgacctagcaagttcactcacacatatatgatcaacataactgataatatatgtacagctacatttcattagtgtatatattattaataagaatgcaaaatcaggagaccatcaaatgcttattaagaagcttcatgacaatgtattatttaatcatggaaaatgtctacagctgacaaagattacacactagataatgctactgataaatgtcatccacagatggaacttcaaaagagagaaaacacatcagtgtttaaaattggtaggtctcaatatccatgggggaaagtgatcgactgctgttaaagacaaaaattgtgttagggctgatgggaatttctgaaagcaggcaattgtgatatgtaaagagcatttttattttctaagaaacagttaaatgttatattcaaaatgaggaatttttatgttacagctattgtattatgtgagttgtatataataaaaattatttagctgaaacaatagctaagtgactctaaagtatatctaccataggtactcaatgttataaaaaacatacgagcccattttttttgtgaggaacatcatatcatgtagcctggaatggtcttaaaatcactatgccctagaacaattgttctcacccttcctaatgctgtgaccctttatattacagtttctttgtgctgtggtgagccccaaccataaagatgttttcattgctacttcatgactgtaattttgctattattatgaatcatactgtaaatatctcctgctggtcttaggtgaccctgtgaaatggtcatgagctacaggttgaaaaccactgtcctaagaatgactatggactttgatcctctttcctcctttatctcccaagtcctggaactacaaatttatgttgccattcctagtcatatttctaattttacattctagtttgtgaaactgaacagtttttccctcatataaagttgtttccatcaaccatcacttttattctaaatttgtcagtaatgtctgcccttgtttgtttatgaaaatgtagcctaaggccaagctgttggctgcctattaaatgcttagtttctgtgaagcatagcctcgactctttctgcatgtactgtattcacttgatagcacccctcctgttaagagtttacaagtaaaaatgagaggcaatggtaccccaagctcgacaaaaaaaggtatcaaaaccaaccctcattacagtaaggagtaagcacaaatcatagccatatacattgatagtcttactgaccatcattctatgaaagataagttcaattatgaaaaattaaaactaagcctttgaaactgaggttcaggttgcttcttttatcaaagctcaacaatgacttttagtttcataatgatatacaaagctctagaaatccaaggtcaacttttcctcatctactcatttattcttgaacaggtatgattctctttccatcccctaaacatctaagattagagttatcttggagcagtgtttcgtacttcctaacaagcaacttcataatcctattgtgttaataactctaccaagatagtatatgtgtttaatccctgcactctggaggcagaggcaggtggatctctgtgagttcaaggcaagcctgatctacagtgctagttagagaacagccaaggatgttacatggtaaactctatctcagaaaaaaatcaacaagagatagagagacagatgaagagagagattattttctgataagttttacttctagctatgatatataagggggcagatttcatcaagataagtcaactagaaacatttgaaatatttaacgagaaacgtttcacacacacaaaaatttcacatcagcaaatatgtagtttttttttttaaaaaagagcatgttgtaggaaattttctgatattttcataaatatcttgaacgtggaagccataaagaaaatgatgacttttgtaagtaaaatcaaggactcctcttaaacaaaaaaattaacagctcaaaggtattgttttacaaggtgaaaaattatgaggcatcttttataaagacactttccaaaatgtgatgagaatcagaaatataaatgagagcaagttttaaaatttttgaagggtccattagcaaaatggggaacaaggaggcaaataatccagagggtaagtgtagaacgctaataaatctttactaatcagaaaatgtcaattgtagtaataagctgttaccttatatctactatattctctgtgagcaagaggagttttcaatggccatcatttccaggtataagacagaatcctgacattggtggaattttaaagaaggatttgactaatatgagacgtgacatttattataataaatgaaagttctaggtaggcaccagctatacatctccatgtagtaatatgcttttaccatcagtttttggagagcaatccatagacttggcaactcccaaggttattagagggttcccatgagctcccttaggccaatgatttcattagatataacccattcatggcactgaaagctttatttggtgatgagagatgtctagttggaggtttgtctcctccattatttagtgattatatttaagtcacctccacaaaggtgcatattttaggaatctcctactgtataattattccaaacacccactcaaatatttcttagttttagttgttcctccccatattcccttctccaatatgccatctatccatagttatctattatatttccctttcttaggttgatccaatcctcccttcaattattttctttatgtctatcctctatggttctgtgaattatatcctacttattgaatacttaacagctggcattcacatatgagtgaaaccatacctttcctgtctttttaggtctgggttatctcattcagagtgattatttatacctctatacatttacatctacattttacttcagttttaaaaagtttggcaatattttgtttttcaaatgcaccacaagttctttatctgttcatccaatgatggattggacatctaggttattatgaataaaacatatgtgaacatgtttgagccaagtgtctctgcagtagtgtgtagaggcctttggttatatggtcaagagtagtataatgatacattgaggtaaatccattcacagcttcctgaggaagagtcacaatgattttcatagtggctttgcaagttttcacaaccactattaataaataagagtttcacttactctacatactcactagcatgagctgtcatttgtttaatggatcttagaattcttaactgttgtaagatgaaatttcaaagtggttttgatatgaattcccctggtgactaaagatttcaaacatttccttaagtgcttcttggccacatgtgttttcttatttgggaattctgtgatgggggatgtccttctgtatgttctgaatatgtttcctttactagtttatgaataaaactgttttggccaatgggcaggcaggatgtagccaggtaggaagtatagcaggactaccagactaggagaatgctgggaacaggaacagagagagagtcatgagagagatgagaggatgctatatagttgccaaggcagagggagacgatcactggaaagccaagactatgtggagatacatagattaatagacatgggttaatatttaaggacaaactacccaataagaatcgtgagccatcagctaaacattttataattaatattagcctctgggtgtttatttgggactaagcagctgtgagaccaggcaggacagaaatttctatctacaattctgtatctaaatctgccccatgttttaattgagatatttgttatctttttgtccgttacaactgattagtgttcattgtaaagaagaaactcttcatgctattgaatgagaaaggtaaataccaatccatatacgaaaccttaaatctacaatgatgacctatatacaagttatgctagtgcaattgtggcacaaaacttgttgaactacacaaccaatatctgatcagatttaaggcacactccatgagatggaatccatccctgaaacagcttgggtggccatgaacctgttagcagataggccagggacctaggggaatatgatatattactgttctgccaaaggaatatagtaatcaatggctcattaaaatagtctgttatactcatagatcaaggccttgctaagccgtcatcagagaagattccttatgcactggatgggaggaaatacagaaacccacaggtggacaatatgcagagagtagcagagtacttggactactcacttcttaatgtgatgtctctgttacatcagtgttttggagtcagggaaccctgtgacagctgaggctgaaatattgcaagagccaaagggcatgaaggacaccaaggaaacaaggccttataaatatatcaggatcattgtacatacaaattcacagaaattgtgccaacatgcacagggctatcaaaggcaggtgccagatagtgtccaagcactgggaatggaattggacagaagctcatattctattacaaaaactctctcccctaactgataatgaccccaaaatgaaaaattagttttctcaaatgaagtatcactgggtataccaaccacacttaaaccctaggcctgatgccatgtggtacatgcccaacagaaaatgaagagctcaatgaagctttttctaattctttctttccttctttccattctcttctttttttctcataatgctttctctaagcatttttttcttttcttactttataaccctagagtcctttctcttacatattacaattcacaattgtgtgtttttaggggatttctgtgtacatcaatatgtatgttacatctgtatgagtatcttatgttttttgctaggctatttgtttttctattcattaattttgtcctaaagaggcttgtttcttttttactttatcatattatttttcttctttgtttagattttcagatgtattcttattttctaatgggataaaaaaacaagaacatgtatttgtgaaggtaaacagatggaaaggatttgagaaactttgtcagaggagggatcacaaatagaatatactgtttgaaaaaaatctattttcaatgaaatgaaaaagaaagtaggattgtattttctgacacaaattgatgtaaataaatatctactcttacatcacatagagaattaataaaaggccaaaaaagaactctacaaaagtcctacattgtgaaccaacatgtttattttcatacttccaggattatggatgagggttacttgaaggtacagagaaattattctaagacagctgcatcaccaaaacagtcactccagcttgactaacagctcatgagaaactggaactctggagcttggtgcacagtttgcaggcagcaagaaagttcaccttgtctcctctggctgatgaactggcctggatctcctcctcagttcttactgcttacagaatcttaagaagggaggggtctgtgcatcttaccagttttaaggaactttctgaattttctgagttgttgacttcttgaatgtggaacattcctctctctctctctagatctctctctctctagctctctctctctctctctctctctctctctctctttcctatatatatccacctgtctttgactcctgagttctgggattaaaggtatgtgtggccactgcactgcaaacgctattttattggaaacaaaaatttatttgttacagaagagtaaaatattttcagctggaatatgtagaatgaaaaacaaaagacccagagagagatattgagactcaacctgaagatcagggaagtaaatctgtcaagcaacctgaaagttcttacctctaaaagggccagagtatttctattctcaaaatgactggagaatgactgtctgatactgagactttgctcctttcttatatgccttcctaatactgggattaaaggtgtgtggtcacgggtgctgagatcatctttgtgtgagctggttttctttaggactggatcaatctttcatagatctgggttgccttggactcacagagatctgtctacctcttaacctgagtcctaggattaaaggtttgtaccaccacctctaagcttctggctgctgggatcaaaggtgtgtgtcttgattctgtagcttgtggctaactgctttctgaatcctcaggcaaaatttactgaatcacaaataatgtatcacaataggaatatttattagattgtagagataagccttcattctatgtcatccataaaagaaatgtttatttctcattgaatcttcaaacatccatatgtgacattatctaaaaagctatagccagttaaaagattagtgtgaggtagattctttaattccttaagcctgtcagctgtacaatgatgtgttgattgtaaaattaaccttcaccagtgataggtgtcaaggtcacaataaagaaagaatagacacttgccatcaagaggatgctgctgctaagcctgtgctactggagtggttcctttgtttagctttttaatgaagatagaaatttcagagttcagaactcttgctttttaacaggactctgcatattatgcatcctgaaacccaaataacaactaaaataataataaaaaagaacctacaacaacaaaataactcctagaaacaatgatatgggttttgacctcaattccataagtgctttccccttatttctgaaagcatcccatgactacaagggcaggcacatgtagtgcagctgaattccccagcaggtgctttgtggtgagcaacagccaggctgcaaagtcagaggagcagttaaggacttaaatcagaaatgaaaatggcatggcaccatgtctagtctgtggggaaataagagagtagcagatagattagaggaatcacaaagagtcaaaactatgtggcaatcagaaatccagggaagcactcacacaaaacaagaaggaaaacaaaccctcacaggctgtggaaaactcactgtataacagtgcccaattctcatggacatttgtgtatagaattccttcattggttgtgatggcgtaccactgaaaataaatggacataggttatagtgtatttttaatgttttaagtgcaggtgacctctttctcaatttgggggaaggcaaataggagcagacagcgtgctccagcacacaccaatagtgatgacacagctttcacatgatgatattatatagatatgggcattaactttagctatgtagttagaccagtactgttggaaaaactctcatggtaacatatcatagccatggggacaatctatctatctacctacctacctatctgaagtatatgattggctgtgattgaatatttccttatttgatgttattgtgtagatttttcctcagttcatgacatagctatcaatctcataaccatacaatgtgatgatgtcatttaacaccaaagaaataagcaaagcaatgaagtggagcaggcagtttggagaatgacagagcctgctcttcttgacaactccttattgtttatacaacactgggctataatattaactttatacctccagtcttcctgagttctatgagctacacaatgaatagcatttcaaaataatggtaaaataattacaagtatatttgtaacttgataattacatttggtgatatttgaaatgttttctgatcttgacaaaacagtttaataagaactgagaaaaatatctattttcaaacacattcttaataaattatatttaagtgaagctaacgttcataaatgaagaataaaattgggaattgtcataatttgaggatgtatttttaaatattagttttacttttgtcacttttgtgctaaaaactccctatgataaacatattcacatgcatagtagactcaaaagagataatagatatggtcattaaattttattttaatttatgaatgaaatataaattcaattgtaattaaaattttaagttttactaaaacgattttcttcagaatgtaataatcaaaatatcaatggtgcttaatgctcaacctttcccacatgagggatggactacgtcataagagcctgtataaccccagataatcacaactttctagggtgaaacagagcttgtgtatttctaaaactctggttacaaatgagacccttccccttctaatatggaaggaaagttaatatccagagttttctcaggtgtcttttacggccaaaagttcacttcttattatgaaatgtgagaaatgttgatatttaattgaacaataaagttttcacttaggtgttgtaatgagctggccatttgccctgtctctgccctcactctgaagtgttcattttcaactcttttcacactgtgcataatgtgatacaattgcaattataatatttttagcagggactattgaaataagctatgagggagaaagatgtacttctgagtatgaggtgtagcaagccataactgtaagatatctggatgaggaacttaaacctcaagtatgtttatacttaactgtatcagctttgtcacagctttactgtagcttgctattttatcttagtttagtttactgcatacaagcattttgcaaataaaaaggaaagtgtgtagtaattattccatgtgatattatgatgaagatttagacaccgaataacctcccgtgtaatgaatgtatcatttagaacaaggaatatgtgttcagtatcatacagtagtagacacccagggaattgagtggttttccctttaagcctgctgttaaggggaataatagaaaaaatgctggagcttgagtaatcaaatagttgtttatttacagaaagtggattttttcagcaatggcacaaatacacttaaatataaggtagcaaaagtatgaaaactgcagttgaaaataaaatgtgagcacaaatatccaaaaactacacttaagaacattgaggaagtggagggaagctggaagtatggtcaccctggaacatagaatgaagggatcaaaaaatcatcctctatactgagggcaatcatggtaacaataactccaatcacctgcagtttcatgcatttgacagatacaagaccagctctgcaggcagtcaatctggatggggagaaagctggtccttttgcttgtgaagttactaacatttttcagaacaccaattttgctaaagcttgcaaataaggtttagaaggaacttctttaaactgattctgtgagaccaggaccaggaccaggccaagaccagaaattttagcaaaacaccagagaaccatatgcatcatataccatggttaggtagatttctccaaggaagactaaggacatgtgaaccaatgcatgaaacacaggaacacaataatgaggagcatgaccatttgtgcaggtgaaggggatgtctgatagcatgcaatacccctacatcactaaatctctccacatattagctacagaagcaatgtcttaacactatgtggctgtacagcaaggactaaggacagagaatgttcagtttcatagaaattaagaacaaattctggaaatccatagaacatcatactgagaagtgatatcatgctgcacacttaaaattcattgagtatattcctcattatgtgtgctttataatataatcaaacatacaactgtaataattattagatagtcttacaaataattttgttatctactaaatctctcttgtagaggtttagagacataaaagataacacacattagatgtccattaatttccagtttggaaaataatggcaattgttataaatccctgggatgaaacctacttgatcatggtggatgatttttctgatgtgttcatggtttcaattcgtcaatattttattgaatatttttgcatcaatgttcataagggatattggtctgtagttcccttttttagttgtatctttgtgtggcttgggtatcaaagtgattgttgccttgtaaaaagagtttggcaatgtcccttctgcctctaatgtgcggaatagtttgaagaggactggaattagctcttgtttgaatttctgttagaattctgcagtgaagacatctggccctgggcttttttggtttggaggtttttgatgactgcttctatttcattagtggttataggtcaatttaaactgcttatctcttcttggtttaattttggtaactgatacctatccagaaaactctccattttctatagattttcgaattttgtggaatacagcttttcaaagtaggacttgaagattctctggatttcctcagtgtccattgttatatcacccttttcatttctgattttgttaattagcatgttctctctgtgtctttggttagtttggatacaggtttgtctatcttgttgattttctcaaaaaaccaactctttgtttcattgattctttgtaatgttttcctactttctactttattgattttagccctgagtttgattatttcctgtcatctactcctccttggtgagtttgcttctttttgctgtaaagctttcagttgttctgtcaattctctagtgtgaattttctaaagtttcttcatgtgggcacttagtgctatgagcttgaaagacccccaagggagaccctcactcaaatcttgggaatagcgcgcacccagtgaggcactgagactggacttgctgcaatcacatgaggaagtttattgaaaaaggaatttaatgagatctcaagccagcatgctggggtcgaggtttagttatggactgctccaatgctcccaggtctgcatccatagccgctctaagctcattatagtagtacggttgttggacaagggcagctaatgagctggccatttgccctgtctctgccctcactctgaagtgttcattttcaactcttttcacactgtgcatagcaagaccgctaaggtcagggtaacaggttccctcttgtaacgagtacagtgatcaaattcatctataaatgaactatcatcatgataaatgactctaggcaccagctggaccaaaatacaaaagtccctagtactgttaaaaagtgaagtttgcaagcagggggtaaggccggtgccacaggcccaccaagtatctgggggggggtactagatattgattttggccatctgtcagggtgtcaatagttatgttacagaggggctggtgtctagtaggcactttgcctatgcatagtccagtgcctgataccgctgacagggtcagcttccgttgactcccccaggggaagtgaatggtcagaagtaacgttatagctccgcatttgagctattccttcataataagggggattagaagcaaagcacagccagcaagattgggtagcagtggggtttgtgcggtttaaaacgacgaacgcactagcgagcagatttacaggcgatcctcagttctcatagggtggaggagggacgtaattggattagggctggaaggggcctttggtgatggggtgagactaggaagtctctcaggcctgggtggggggttaccaagtgccggattaggtcctacgggtcatgcgggtggattttctatctttatcctgatagcaaaaaggaacccagggtctcccgttccagtatagtctctccaaccccagcagttgccttttacccattggcgatcttgttttccccgtgctgtgaaactaatattcagagggttacattagctgcctttgcatggcccctgagggccacccgaggctccaggagcacatccagtcttattagccgggtatttagatgtgtctctctctcctttttctggctcttgcggcgtacgacccttttttactataatcagatcccaggaagaggagggattccagtaggcttctcctgtggtctcacatccnnnnnnnnnnnnnnnnnnnnnnnnnnnnnnnnnnnnnnnnnnnnnnnnnnnnnnnnnnnnnnnnnnnnnnnnnnnnnnnnnnnnnnnnnnnnnnnnnnnnnnnnnnnnnnnnnnnnnnnnnnnnnnnnnnnnnnnnnnnnnnnnnnnnnnnnnnnnnnnnnnnnnnnnnnnnnnnnnnnnnnnnnnnnnnnnnnnnnnnnnnnnnnnnnnnnnnnnnnnnnnnnngcagctaacttacagatatcaggtgcaagatcaggccaccaagtccaaggggggtgcactgcggtttttgaccacacgatgtcgccttcttcattaagcacttcccatttcccatgcggggaacatgcgggttattccccaaggttggggctacggcgaaggcgcaacttaagaggattatcactggcggccactgtccaattattttctcggttgttttcattttgactgggtgccttttttatgtgggaagcatggatccaggcaacaatcccatctacctttactgccgtgggtgtagtcaacagcactagatagggtcctttccaccgaggctcaagtgtgccagcgcgatgtcatctgaccaagactgagtctccgacctggaatcgctggggcacctcggtggtccctggagtgtaggcttctttgatctaatcccagatctgtgttttgacaacttcttaggcctttaagtgggtaaacagagcagaggaggagggagagtgagtgcaaggatccaatatccgcctgactcagtcaaggggggctgtcccccatgtaggattttgtaaggggtaaggccgaaacgtccaggtgtgaatcggacactaaggagcgcaaaggggagaagggtcacccagtctttgccgccggtctcaatagccaatttagtaagtgtctcttttagggttctattcattctttctacctgtcctgagctctggggtctgtaagcgcaatgtannnnnnnnnnnnnnnnnnnnnnnnnnnnnnnnnnnnnnnnnnnnnnnnnnnnnnnnnnnnnnnnnnnnnccgttgtctgaaccaattaccttggggatcccaaacctgtgcaggatttcttccagttatcttcctggttaccatttgagcagtttcagacttcgtgggaaaggcttccacccatcctgaaaaagtgtctataaaaactacaaggtacttattaccatattttcctggcttaatttcagtgaagtctacctcccaataaattcccggccgatctctcctcattctttttccaggttctttgaacggtcgggcagcattggtcaaggtgcaggcttgacatgactctattacctcttttattattgtatttaatcctagaacataatgtttagaacctttgattaattgcttaagtttttcgtttccaagatgagtcagctggtgaattcatctcacatagacttgtccttctttagagggtagaatgattcttccatctttggtttttgccagtccaccgaaactgaacatctgagcttttcctgcacaggtcatatctttgattaaatcataatctttatagggatagacgaagctgggatggatgacgctggcttgtggggttctggcggggttccagtttcttctgccagcactaccgctccctgggcaacttactttgctgttagatcagccatctggttcccctttgtgactgggtcagcccccttctggtgtcccaggcagtggacgatggctaatttttgtggaagatgtatggcttctaggagggccaggatttcttctttgtttttnnnnnnnnnnnnnnnnnnnnnnnnnnngaggtaagcccctctgtctgtaaatggctccatgaatgtgagccgtggcgaaggcataacggctgttggtgtaaatgttgagagccttaccttctgccagacgcagagcttgagtcaatgccaggagctcagctttttgagccgaggtttcttctgggagactgctagcccaaattacctgctttccattcaccactgctgctcccgcccttcttttaccttctaccacaaaactgctgctgtctgtataccagttaggcacacccggccaaggttgtgcggtcaggtccttcctggtcccggtctcttcagccaggacgtcagtgcaccggtgcactggggtagagtccttcgcttcggggagggggtatcaagagccggattagggcctacgggtcgtgcgggcggactctctatctttatcctgatagcaaaaacgaacccagggtctcccgttccagtatagactctccacccccagcggttgccttagtcaggcggctgccacacaatactttctaaagcatgaggggcgattacagtcatatgctgacccagggtaagcttatcggcgtcttttacaagtaaggctactgcagcaatggctttcaagcaagagggccacccgctggcaacnnnnnnnnnnnnnnnnnnnnnnnnnnnnnnnnnnnnnnnnnnnnnnnnnnnnnnnnnnnnnnnnnnnnnnnnnnnnnnnnnnnnnnnnnnnnnnnnnnnnnnnnnnnnnnnnnnnnnnnnnnnnnnnnnnnnnnnnnnnnnnnnnnnnnnnnnnnnnnnnnnnnnngggtcaacgcgggagctgtgagcagggcagtctttattttatcgaaggccctttggtgttcctccgtccaggtgaatgggactttttctttagtgagtgggtacagaggggctgccagcatggcgaaccccggtatccagagtctacagaaacccacagttcccaaaaactcgtgtatttgtctcggagtggtggggggcgggatctgcatcacagtctttttccgtgcttcagtgagccaccgcttcccttctcggagagtgtatcctaggtaggtcacttccgagcggcataactgggctttcttggtggacacccggtaccccaattcacccaattactttaggagctttctggtcccgtcgaggcacagttcctgggtcaaggctgcgagcagtaaatcatctacgtactgcaagagagaaatctgggagtttcgtgccctgaagggtgcaaggtcatggtggagcgcttcatcgaaaagagtctgtgaatttttgaacccctgtggcaacnnnnnnnnnnnnnnnnnnnnnnnnnnnnnnnnnnnnnnnnnnnnnnnnnnnnnnnnnnnnnnnnnnnnnnnnnnnnnnnnnnnnnnnnnnnnnnnnnnnnnnnnnnnnnnnnnnnnnnnnnnnnnnnnnnnnnnnnnnnnnnnnnnnnnnnnnnnnnnnnnnnnnnnnnnnnnnnnnnnnnnnnnnnnnnnnnnnnnnnnnnnnnnnnnnnnnnnnnnnnnnnnnnnnnnnnnnnggacaggtcgataatcattggttccaggcttacgtaccagcaggaggggggtattccaaggggacctgcagggaatcagtataccttgttgtaacagtctctggatatgtggttgaatgccttctttagccccttgagtcatagttcccctccacagagagagttactctaggctcggggagggggaccgagccccgactcccctaatcttcctcgagggccaacatcttggggcccttttgtttcttttgggagaaatctctagcccagtgtcctttttctttacagtatgcacattggtctttttcaagttgcagtctctgtcctcctgggggttttcttgccctgttgcccaggtaacctgactgtcctctttctgaccgttctctgcctactactgtggccaaaatcttagtaaaattcctctcctggcggcgatcccgccgattctccctctcttctgcctccattttttttctttcttgtttttcttcctcagtctctctcttgtgatacactttctctgcctcttttactaaatcctgcaatgtataatcctggagcccctctaatctttgcaactttttcttgatatcagaggctgagtgtcctataaaagccatggctacagccacctgctgtccatccgaggagggatcaaatggagtatatctcctatatgcctccatcagtcattgtaagaagacagagggtgactctactggaccctgtaagatttctcttacctttgccaaattggtgggtcgctgagaggcccccttgagacctgccactagagcctggtggtagaccgtgagacgccccctatctcctgcagagttgtaatcccagtcacgggggagcaagggaaaagcggcatctataagattagggagattggtgggggtcccatctggtcctggaacattctttctggcctctagaaggatcctctctctttcttcagtcgtaaagaggacctgcaagagttgttgacagtcgtcccaagtgggctgatgagaatatatcagggacttgaggagtcccgtcaagcctgaggggttctctgaaaaggaggggtggttagttttccagttgtacatatccgctgatgaaaacagccaatactgcagtggaactaattcccctggagctgggtcgggtccataagctcataatggtagcacaacggtggaatcaggtcccgcaccagatccctctgggctgcggccccggcggcttcgagtcctggccactggccctattttggaggccagccgggagtccgttgggacctgtggggctgcatgagaaacaggttgaggatatgggggaggagggtggtcaaggagggagacatcataaatttcaggatagatccgcgaaggagctgttggatcaggcgctggcgaatctgaaggaggcactttccttgcagccaccgcaacagttgcagtccctattcccgatgtccaaggcttcatccagggtggcgggttttggactaggtcctgccacatgataatgtatggaacctgatcagggtatccccctgtggcctgaaaaataattcgcttgacagcggaaataacagatggattaaaagttccccccgaaggacatcctacaccgaaacttggccattcggaagaacaaaaagtccgccaaggtacttttctgaccttgacagaaagattatgagcccgagtcttaatgactgtccaatggtccagggtcagtgttagtggggtcgtcacagtctgtcccatgtctacctctgttacacacacgataaaaacaatcaccatgacagaaagacaaggaagcaaagcgagctgtcgacctctagtccaccagtaattctgaaaggaatcaggcggccgggaaatggccctttgacacagatcatcaaggagaaaacttacctcccgaccttctccgtggaggtccaccaggcatccctggtccttctcctgtcctcccgggacgtctcccagggtgaccaaacgctggacacctggacacatctatccccgtccactccgctcctcctcctggcgagcggcctctaaagagcgtttgcgaaaacgaaactgcgatcgcaccagatttttgaacaggccacaaacaaagagtcacaacagaacaaaaattcttacctccaagtgggtctaggacccctgggtggtcacgcaaatcctggacgagccccgaaatgaaagacccccgaagggagaccctcactcaaatcttgggaatagcgcacacccagtgaggaaccgagaccagacttgctgcaatcacatgaggaagtttattgaaaaaggaatttaatgagatctcaagccagcatgctggggtcgaggctcagagtagttcgaccccgacccaaacttgtgacaagcttataaaggcaaaaaccataaaggaggggagggggactagggaggaaatagaggaagcccaaagttacacattcagtcataaaggcaaaaaccacaaaggaggggggaggactagggaggaaataggggaagcccaaggttacacatttactcatcagttaaactatgtggacacacctggggtgtttgaacttttcacagaggtcgttgggacatcctgtggttattccaggagtggtttttttctttcttttttttatgagaattccgggagtggccacctgcaggggagggagcccccaaggtgacaagcccatgttcttatagccagctagtaatttttactcttcaagcgttcctcttagcaatactttcagagtgtcctataagtttggggatattgtgtctacattctcattaaatttctttttttatttgttcctcaatgcaggaatggtgcaactatgtgttattcaacttccacgaatatgtaggttttctgcaatttgtattgctgttgaattctagctttaaagtatggtaatctgataagatacaaggggttatttcaattcttttgtaactgtggaggtttgctttgctgccaactatgtgataaattttagagaaggtgaatgtggtgctgagaagaaagtatattcttttgtgtttggatgcaatgttctttagatatctgttaaacccagttgggttataacatctgtcagatcctttgtttcttttgttaaggtttctgtctgctggtcctgtctagtggtgaaatggggtgttgaattcccctactgtaagtgtctgtggttttatgtgtggtttgtactttagcaatgtttcttttacaaatgtgggtgccttcatatttgtggcatagatgttcaggattgagacttcatcttgatggacttttcctgtgatgagtatgaaatggccttttcatctcatttgattacttttagtttgaagtctaatttgttagatattaggattgctataccagcttgtttcttggtcccatttgattggaaaatctcttcccaaccttttactctgaggtaatacctgtttttgaatttgaggtgtatttcttgtaaatagcagaaggatagattctgactttgtatccattctgttagcctctatctttttatgggtaagttaagaccattgacatttagggatattaatatccattgattattggttcttgtttgttttggatttattgttggtagtgtcattgtgtgtgaattttgccctcctgtttcttttcgtgtttggtaaaattggattatctattgcctatgtttttgtgagtgtagttgtgtttgttaggttggaggtttctttccagaaccttctgtagtgctgaatttgtggatatgtattgtttaaatctgtttttgtcatggaatatcttgttttctccatctatagtgattgaaaattttgctgagtgcagtagtctgcgttgacatccatgctcccttagtgcttgtaggatatctatccaagaccttctggctttcagagtttccattgagaagttgggtgtgattctcataggtctgcctttatatgttacttggcctttttccattgctggtcttaatattttctctttattctgtagatttggtgttttgattattatgtgtcggagggaattctttttgtgatccagtctgtttggtgttctgtaagcttcttgtacagtatattcctcattatgtgtgctttataatataatcaaacatacaactgtaataattattagatagtcttacaaataattttgttatctactaaatctctcttgtagaggtttagagacataaaaattacgtcttttcacggtgtcccatatttcctggatattttgtgttagggatttgttggacttgagattttccttggttgatgaatgcatatcctctagcaagtcatcaacaactgagattctctcttctatctcttgaattctattggttatactcacatctttatttcctggtcatttatccaggctttccatttccagcatcacctcattctgtgttttctttattgtgtctatttcagcttccatgccttgaaatgtttcgagtgtttcctttgcttgtttggttgttttctcttgggtttctttagattctttaagagatttgtttatttcttaaatttttttggtttgtcttttcttccatttcgtgtaaattttccttgcttttccttcaatttctttaagtgattatcttgtttcttctttaaaggtctctatcatcttcccgagataatttttgagctcaatcacttcttcatttttttgtgtcgagcttttcggttcttgtgttccattccgatgtcttcaggactgtggacatagccagccatacagtcctgggtctgattctgagtggagatttgtggactagggaagtttaattacccaatgatggtaaagatgagacagcaaacactatatcatcttatgagggttcccagctgttgctgagaagccacagcttattgagaactccatttaaatagtcatccaagggcagagacagcatcaggaagcatctattatgatgtatatagctaccatcaagtgattctattgactcaagcattacctaaataactcttggtcttgtaggcagagtcctcagcccagtcatggacctactcaaatctcaagccatacagatgcaaattaggaggtatattaccctgaggccatagtaaacaatagtagccatactggcaattaacaatacaatggtgagctggagctttctggtgctccattttactgaagctggaggctgagacacaaaatattccataacagaattatttgttctcccacagtcttgttggtgtggagtccctagattctggtggtttcatattggtctttctgttcttgagtgagttcttattctgtcttcttcccatatcttctgtctggtgcaggtggggtctctctatctcctcttgtgacctggtggtgtgtgtgggctaggacttcactgtccacagctctggattttcttgcctctcctgctactcacctcactctgaaggggttaggcctctcggtatgggataggtcggtggagtgggaatcaaaagagttgtttttatataagaaaaacctcctttaatagtttgtccttggaaagctttttttgttgttgttattcattccttggtgttctttaatatgataccaatttcccctttattagtatcataaagaatggcatggaaatgttttcagatctgacagacttggtcacatcttcatactaatcttaaatagatagatttataagaataatgacttgtgagttagaattttctttccatcaaaagtttgaaactcttgctacattttattctatattgtagcataaaatttaaggtacatttaatttacactgaaagaggatttgtttattgtgaaatttctactcttatagaagataaagcaatatgttacttacaaaagtcaatgatgctaatgtatgcacctaataacaaaatcaaatgctataagcatcatgatgtctaatttcacacattaattttgatgtgtctgctaaaattttgacaagacagtctactaagggcacaattctgcaaatggctatattttgaactgtttcttttggtaactctatattatattcaatttattaattgattttccatgttttatgtttgggtgctataaatttaagtgagtattttgccattattaattagctttgatagtcatgagtttaatgagttaggttctaaaatattacatccctttttaacaatatctacatattaactttacatattaagagatggttggaagatgaaaaagaagaaagacagactatgaaggagtttttaaataagccccccaaacctaatgtgtctgcagattctgtatgaccactgttttctgaatagagctttctttctgttagagtgtccttcatgctgtcttgggatgagtatttcctttgtgtttctactacagtcagtagttgctcagtacatgctgtcacatgtgacagtccctaaagtctaatgcaattcatattctctaggggaaaatcaaataagccttcaagtttcatgatgtctcaggaaacttgtgcctcacatttagaaattagtttcactgtctcttttaatagtagtcacatcatacattctcctgttgaagaaagttggggtgtgtattgacattttccactctaatgatcactataattcttttgttggtagttgaccagtttccaatcacttatgtgttttatttctcatccatgaacctaccagacttaatttcatcactcctccatttattcaaggttctataacacttgtgaagtacagaatcctcatgccttagaaccatttagtcccactttgatcaaagtctttagtcagcatatactgtgtctgaaaggttcaggcattatgctggcctgcccctgttacctggtggaacaggcagtaccctggtcagcccaaggttccatgggaactaagtctgcacgaaggtgcagaggacccctttaaaagacagatccctgcccatttatgctctctcttcctctctagtcttctctctgctcttctctcacctacattctctctgtctctatggcgactggccacggcagtcagccattacccctgctcctctttgaagggaccagttgcccctttcggcagccatgacagtaatacgtgctcgccatgaccttgccttggtcactaagaggtcagatgcctgcctcattgcaaggaaccaatcagaagttaactgctggcgctatcctttacagctttgagtgtgcttgacggacaagtgcacagcaatgacacccagagcatagcaaccaccctggtagggcctatgggccataacagccaattgctcaacaaacagggggcaagccctccaagcctggaggcacaccaatccctagcctgtgcgtagccctagacactccacttaagctgccctacaagatctctatgcagctggttcaaagtgtttttgctagccatccgccatggtgggtgggcgaaagacccaagctaacatggggttagctcattaaacaacaataaagcctcatgcagtttgcaggaagttttcaaatctgcctggtgattggggtgactgaggacctgggcagggaccccggaggcctgagttttccaggggtctaacatcttctctcttagtctccctactctgccgggcccatataataaactagccaacatgtctcatcttaaagctttctcttttcccctttttaaataaaaacataacattggctcctgacttggtttaggctctctctgtaagctctcccgaagcttgctgatgggataggctttctctataacttctcctgccatgggcacaggaaatttcggggatcctaaaatctgaactcataatccacttccatctcggctttttctgcctgcagcagactgagatgccagaactctgtacacttcaactctccacatttccaactaaggatctctggaactcactcatctgcttgttcactgcaatcgggtaagatacccataacttttcccatggggcagaaccagcactgcatttttgagatcactctgggtacatttttttggtttcggactgctgagcctctctcaggctttctgctgggtgatctcagacagagcaatcagtgccatttttggccttgcccacgggatatacattttatgggattttttggttattgccagggagtaggtaaatgagaggagttctgcctcccagtgggaactttctttcacctggaaatgtccttcatttttctgtttgttctctctctgactgtgtttcttcttagttggcaatgtctgcttgaaacactctgagagtttttgcttgtttgtttgtttgtttgctgttttttatttttccacaccaatgaggtttgactcatggagaaaaacttcttctggcaattaggaatgtgcttacaggggtcgccatctcggccatgtgcactaacctgggggcagccatcttggtcatgtgccatcctaaccacctgacctagcttaggcctgcccactcagttcagtcacttgcataggcaaacactgcgaccagacatcttgctttttatttcttctttcacttgttggatgcatttcctgagggtcaggcataggatcccgctccaggagcagtgctttttgctttttcaattcagaccactgtgtccttttttgcttttggggacagctgtgtccccttcaggaccaggccccatggcaactcccacaggcagatgtgcatcaggaggggagctttttgccagttttccacttgactcacccatgggaaatgcatagaggaacctttctggttgcagccaacaagcagataaacagacaaaacattggcttatggttgtcaccatctttgtcatgtaacctacctgtaggcatgcccactccagtggcctatgccagcaaacctgtctgctcgattttttatttctgccagatcttttttgctttttgttttattttatttttttctgtgatttcttttttcactggctctgttgtccatggcttgtttactaaatattgtgcctttccagggcgctctgtttaagtctactctgtccctttaaatctcctgtctttttgctacaatgtatggatcagagattacattctagttccccctttactgttatccagtcctgcttgtctctgtacctgtaatttaactttatacttatctagctctatatgcaacttaaattaaactatgctaagtctcatatttctaaattgctatgtatctttaaatgatggtaaacatttagagtcataaaggtctaatttaactgtacttaaaatataagcaaagtctatacaacttaaatttaactcatgtatctttaaatgatgatgaaagtttaaaatcataaaggtctatttcaaactaacaaaatatttataccactcaatctatcctgtaaaccatttacaaaggtacagcttttattacaaaaaggcatttttctctaactaaaggcaaacttttaactgctgagatactgaacagacagccctcaaatgctcagagatctagagaatatggcatttaaaatgttttgttaaaaagctttttataacagagagataggccagctgctggccccaccccatttcctccaagaagactgctgggcactgaagaaacttcatctcgagtcagtgacaacactagtcactgaacaaccctgccctttacctcaactgctgcaaagtactctagacctttgacaagttgacagtggaatcgattttccccgagttgcttgggccaacagtaggcgaggcttcctatagtctgtaatccacaggtcacatgctaaaagcaagaaggcaggtgtcctacagcccgctgttatggatggaggaccttggggatggctgtccatgcagcctgctggcaagtctctgttattctttaatcattaattcaggtaaaatcttatccttctcaagaactctgatgcttttgacgactgtagtcttgccagcttaaagcaaaaacagattccaggaacagttattttggggtttatctatgtgaagataggaaagtctaagatgtatgaaggtctgagaatgtagttacgaaggtatgaggctgaaaaggtctaagcaagttatgaaggtctgagaatggaaggtctctgatggtaatgtaaagtgcatgaattaaagttataaaggtctgagcataaaaagtcttaagtgatgataaagtgagttgagacattaaaaagaatgaaatatgttcctgatttctctatttctcatgctactgctcatagtaaagttcaacaataccactgtacagtcataactacaaggtcaagattaagatgcttttcattgtcctaaaaaaaatctgtctatttttaaaatggtaatgcttttagccaagttgcttctatagtgaatatgctgctaatgtgtctaatacttatgtttccacaagctctaaggattcttgtaagtttcagggacctgaattgtatccaaacaaacaggtctaggagccatcaggaagttttgtacagcctggactgcaatgaaacaaccagctaccccaggatgtggcagcaccccaaccttcttgggtcccnnnnnnnnnnnnnnnnnnnnnnnnnnnnnnnnnnnnnnnnnnnnnnnnnnnnnnnnnnnnnnnnnnnnnnnnnnnnnnnnnnnnnnnnnnnnnnnnnnnnnnnnnnnnnnnnnnnnnnnnnnnnnnnnnnnnagaggtgggaatgaaaggttcaggcattatgcttgcctgcccctgttacctggtggaacagacagtaccctggtcagcccaaggttccatgggaactaagtctgcacgcaggtgcagaggacccctttgaaagacagatccatgcccatttaccctctctcttactctctactcttctctctgcttttctcttctcccacctacactctctttgtctctatggtgactggccatggtggtcagccattacccctgttcctcttctctcttagtctccctactctgccaggcccatataataaactagtcaacatgtctcatattaatactttctcttttcctttttttaaaaataaaaacctaacagtgtctatctgtaattttctggaaaatgtcatattattacatgaaagaaatttctgtctgtaaggcgacacttgtatgagattagcaaacaatatcatctacaaatacaggtgctacacacacacacacacacacacacacacacacacacagagagagagagagagagagagacagacagacagacagacagacagacagacagatacagagatgcactcacacacaggggagcaggagaagggcacacaactttccagcactcactgagttgaaatttttaattctgttatccagttcctgctcagactacaaatgtaagataattattaaattggccaaaaattctgatatacatagtaagaattttgtcattaaattaacctattaaccttacattatcttatttgtgttcatgataatcagtgtggttggtgaccacatttaccggacatttgttttccacatattatctgattaaatctttgaatcaaaatatcaaattgacttccaaatttttatacaatgatgttaaatactagtaagtaagattaataatattcattgatttgccaataataagatatgccaacacattattattaaaatataattttaataaggggaaatccccaaacttgaaaaattttgggtacaaaacacttgagatactgttgtaaaaaacttaagatgtgaaatgtcagtataatctggtaaatattttaggaagataattcctaaaaatttaaactatttttgctacatatgtagttatattgggatagagatgttaaaaattaaaaaaccatgatagaaataaaggaagaacttttaaataagtgaccaaatccaactacactacactcatgtatattttttaatacatgcacctcaattttaaagaatggtaaatggtcagtttagtattacagagaacatttttaagaacataggagcctttacaatgaacactgatgtttggagtgtagctgtgtggatgtagaattaacttacaagcccacattctaggaaggaaaaattttccttttcagtttctagtgaattccaagtttatttctagcaacttgtttaacatctctcagtgcagactataaattattcatctgttacactggactggactaaaggagtagaggaaataactcctggaatcagtcaatactcttgcattcagtacaatgaaaattaatctaaatggtcattttgtgaaaggctatatcctgagacatttagcagctacccctgaatgaaggttttgaggaattatttggatactgagcatcactattatgtttaaatattttatttatgcatatacgtattttgtcttaatgagtgtatgtaccaaatgtgtgcctcttccccactgaggctagaagagggccttagataatctggaatgagatatttgtatcatccactgcccacaaattaaagatctacttttaagaatccattttccatttcaatgctttatcatgaggcctgctgattaagaggaagaagggttttctatgtattttaattataaaatagatttttctaaacatagaaaaatactaaaaataaaaccaataataaatattacctgtctagggatggaagagatggctcagtgggtgagacaagtggctgttcttacagaggattctggcctctgttcccacacctacagggtggctcaaggttctgtaactaatgttccaaggggtctaatgccctcttctggccctcttgaacactacaacaaggtggcagaaaaataaaaataaatatttcagtaaaaacacttatacacatagttacttgtctgtttctttcacctcttcttctggaaataattttttaaactcggttttgtcaaatttagaaaatgggtttctgaaagtttaagattgaatacaagctctaatattggttttaaatgtattaatattgtctgtttcttccatctaagattataccaggcttgagtcaaatgatacttttccaaatgcttcccaaatcaaatgctcttaaggcttgctaagaatttgaccagaatgaaatattaaaataatagatgaaattgttgggttgactctggtctctgtgtgcgcacactaatacttccagaagcctctagttttcagtaccattttctccagtctcagaactgtatactttctggcacagtgcattatttacttttaaattacatcctcagattactttggtgccttctagtattgccaaaactatatattacacttgttctttactgtaagttgtagagtgcccttgccatagcaacttatcaatacagcatgagatttgagtattgatttatgatgaaagtttactaagaacataaaagtttgaagtgggtggactgagtgacagcaggatagtcattattcttgaatacaacctgggtagggatggtgtaaaccacgaacttttcacaacaatattaataaacaattataggcccatcagtgatatttggtacagatatttgagatacactgtattaagcaattaaatgtctattctacctagtgatcctttgttaaataaataagcaaacatgactgatcatgagttaatattcaagagcctagttcatgagcattgggaataatctctttgtaagtgtacaattttacataaacattagtttgtttttaattacaaatgtatgcttgtcattatatgttctcatataatttgttatctcacactcttggtgcgagaggcctaactagatttttaaaattattttactgtttgaaattaaacttcagctgtaccaaattagaggtataataaaagaattaaataattgaatgagaaacaaaatacttgctatcatggatatactcagacagtcttttcatttgtaaatacttgttctgtataaatttacaactagtataccaagataagtggaatgaataattctaaatgaccatctttggatcattagttaacaacagttaatttctaattttctagatatgtctcagtgatctagctgaaggaatgatcagatagatagacggacagatagatgatagataattttagttaagtatgatcactacgttaagctctcttttaagagtaacttattttaaattaaactataaaattaaaattatttatgtataactatcaccatgaattgtccaaaatatatgtacatgttatactaatttatttaatgaaattcttcttaaatagctatgataaaataatataaagtacttagatgtactgatgtatcatgggatgaaaaatttaaagtaaaccttgaccataaatagaattactaatgaattcacttgagttctagcaaaaaataaaggatataaaaatttggcaacttaaaagatggctcatctattaagagcacatactgccttttcagaggacctgatttcaattctcagtaccactttgggaactcacaattgcctgtcacattcacagtccctcacacagacaaatgcatgcacatttaattaaattataagccaaagtatttcaaatatgatgatcatcaagtgcaaaaggaatgtaaactagtaaagaatattaacaaaggaaatcttattcgtttcttcttacatataatatgttaggaacaggttctaatttgcttttatctagacatggaaaaaataattagacatagtaatccttcttggaaaacttctaatgaaatgaaatcttattatagaaaatttctgacacacttaaattacatgtcaataagagtatgtatggaaatagttaagattacagggcaaggacaaatccacatttaagaagatattgttcatacacatattcaaaacattaaatacaacctttttaaaataaatatttcttctgcgtttgcaattatttttatttaaattaaaaacaatctcattttataaaccaatcttatcctcccatggaactccactccacggggagggtgaggccacccatgggggatcatcaaaatttgtcacatcatttgagggagggcctagatgcctccctatgtatctaggctgaaagagtatccctcaatatggaatgtgctcaaaaatttcatgcactagggataaatactggttccattggcagaggccctatagacttccctggcctcccaattgataaccacattcaaggggcatggctgggtactatgatggttcacaggctgtcagactaccatgtaatatcacttactcaggtcagcagttgttgtggctttacccagcatggtcttctcccctttgctcataactcatctgtctctacaactgggtaccaggagtttggctcagtgattagctatggatctctgcttctgcttccatcagctattgggtgaaggctctagggtggcatttcaggtagtcataaatttcattataggagaacggcatttaaggtagactctccactgttgctgagactcttagtggggggacatccttgtagatctctggatatttcactagtgacagatttctctttaaatctataatggctccctcaattaaggtatttctttttttgctctcattctctattcttccctctactcaatattcccgatccctcatgttctcttccaccctcttctttatcctgcctgcctctctgctcctcctgtgcccccaatttgctgaggagatcttgtccatttccctttctgtgggtgtctatatagttctctcttaggttcctacttgcttcctatcatctctggagatgtggattataggcagaatattgacatcctctccagcattaactgtagatggtattttttgtttttagccattctgacaggtgaaagatggtatctcagagatgttttgattcacatttccctgatgacttaaggatgttgagcactttcttctgtgtctttcagccattttagattcctctgttgagaattctctatttagttctgcaccccactttataatttccttgtttgccattttggtggctagcttcttgagttcattgcacattttagatattagacctctgtcagatgtggggttgatgatgatcttttctgattctgtggactaccatttggtcttgttgaatgtttcctttgccttatagaagcttctcagcttcaggaagtcccatttattaatttttaaccttaatgtctgtgctgttagtggtatgttcaataattggtcacctataccaatttgttcaagggaacatccaccttcatgtctaagaggttcagtgtgtctgaatttatgtttaggtctttgatccatttggacttaaattttggtaagattgccatctttattttgttgattctacctatctaagtgcatgggagatctttccattttctggtatcttctttaatttctttctttaaagactcaaagttcttgtcatacaggtctttcacttgtttggttagcgatacccccaagatattttgtgttatttgtggctattgtgaagggtggtatatctctgatttctgatttctttctttcttttttatttggagacaggttttctctgtgtagctttggagcatatcttggcaattgctctggagaccaggctggccttgaactcacagaaatctgcttgtctctgcctcccaagtgctgggatttaaggggtatgtcaccaacacccggttttctctgatttctttctcagcccatttattgccatttattgtctatacaaaggaaggacttttttttttttttacttaattttgtatcgtgccactttgctaatggtgtttagctttaggatttccctggtagaattttttgggtcaccatgtaaaccatcctatcatctgcaaatagtgaaagtttgatttcttcctttccaatttgtgttctcttgatctccttttgttgtcttattgttctggctagaacttcaagtacaattttgaagagatattgacagagtggacagccatgtcttgttcctgatttagaggaataacattgatttcttatctccatttagtttggtgctggctgttggctactacatattgcctttattagggttatgtgttcgattttttcaatggttttttaacatgtaatgagatgatcatgtgtttttttctttttcagtttgtatatatggtggattacattgatacatttttgcatgctgaagcatccctgcatccctgggatgaagcctacttaattgtgatgaatgatttttctattgaaattttttattcaatttgccactattttattatttttcactgatgtacatgagggagattattctcaatttctctttcttagttgtatcttgtgtggtttgggtaccagggtaattgtaacagcctaataaaaagagtttgttgatgacccttctgcttctattgtgtggaacaatttgaggagtattggtcttatctcttttctgaatttctggtagaattctgcacttataccatgtggcacagggcttctttttgttggaagatttttgaggactgcttctatttcattagggtttatatttctctttaaattggttatctgttcttgatttaatttttgtaagccatatctatcaagaaaattgtccatttcatttaaattttccagttttgtggagtactggttttcaaagtatgacctgaaatttctctggatttccttagtgtccattgatatgtcccctttttcatttctgattttgttaatttgcatgttttctctctgccttttggttagtttggataaaggtttgtctatgttttcgatttctctaagaaccaactatgtgttttattgattctttgttttgttttgtttgtttctaatttattgatttcagcctttaatttgattatttcctggcatctattcctgcttgctgactttgcttctttttgttcagaactatcaggtatgcagttaagtctctaatgtaggtggtattctccagtttctttatgtgggcacttagtgctatgagctttccttttagcactgttttcattgtgtcccataagtttggatatgttttgtcttcattttcattgaattctaggaaatctttagtttctttctttcttccttccttgacctaggagtgacgcaattgagcattgttcagtttccatgagtttgaagactttcttcaatttttgctgtggttgaattccaacttttaaccaggctgatttgataagacacaggtggttattcaatttttttctgtacctgttagagtttgctttgttgctgagtatatggccaattttaaagaaggttccatgaggtgctgagaagaaggtatatttatttgtgtttggatggaatgttgtatagatgtcttttaaaaccaaatgggttatcacctctttatttatttgttaagtttctgtctcctagtcttatccagtagtgagaatggggtgttgaagaatcccactataagtttttagagttttatttgttatttaagttttagtaatatttcttttacgaatatggatgcctttgtatttggggcatagatgttcagaattgggagttcatcttgttatacttttcctgtgataaatatgaaatgtcattcctcatctattttgattaattttagtttgtagtctaatttgttagatattaggataggtacaccagcttgtttcttagatttatttgattggaaaatcttttcccaaccctttactctgagataacatctgtctttgactttgagatgtgtttttgtatgcaggagaaggatggtttctgtcatggtatccaatatgttagcctgtgtctttttataggagagttaagaacattgatattgagggatattaatgaccattgattgttgattcttgtttgttttttatttgtttttggtggtggtattgtgaatggatttccaacccttttttttctgttgccttttggtaaactgggattatctattgcctatgtttttgtgagtataattaacttccttggtttggagttttccttccagaactttctggagggatggattgggggttatgtgttatttaaatctgattttgtgatgtaatatcttgttttctcaatctatagtgattaaaagctttgctgggtatagtaggcttggctgacatctgtggtttctttgtgtttgtagaaaatctatccacaaacttttggatttcagagtttccattgagaagccaggtgtaattctgataggtttgcctttatatgttacttggcctttttcctttggcactcttaatattctttctttatctgtatgttcagggttttgataaatatgtggtcaggggactttttggtggtccagtctatttggtgttctgtaagcttcatgtagtttcataggaatgtctttctttaggtagggacagttttcttctacatggtgccatactcacctctcatggtgggtgcaggcaggtctaacactccaatggaagaagagacttgatggtttggtctgtccccggttctctgggggatttcttgggcaggatgggactaccgtgttcagttctagagggaggagaattcaagaagagggaaaggttggcaggagaaattctgtactcacctctcctagtaggtaaaggctgatcaagtcaataatggtggtagacgccaaatggtttggtctgcccccaggtctctgggtgattcattgggcaggattcgactactatgtgcagacctcattgaggagacatcaaggagagtgagaacacaggcaggagaaggccccacactaacctctccaggttggtgaaggtgggtccaaggctccaatcactaaattattaagtgactaattttttggtttttaattaaaaaaatcttattttacagactaatcacagttagctatttttaactacattaggatagattggagaagtaaagaaaacagaactgctcttcttgcataaccagatatgtggagagaagctagttttggataataaggaatattcatcacaatttttgtagtaatctgttaagatttataatttacttatctttcttttcaacatcaaattatttctttttgatacagtttggttttgttatctgtatttagataaagaactgttacaataaaactttccgccaaaagccacctgagccccaccaccacgtgtgagctttacgccagccaccagccctagttagtcccaaatgaatacacagaatcttgtattaggtacaaagctgtttggccaatgactaggattctttatctgttagctcagtcttaattatcatacatctatatattttataagacttatcttatcgaaatgcttattggcatccctccttgccggtggctcacatcctgctactggaggaggcaaacgggggaaaaaagggccacttcctatttcctcgcttagatatgagtctcgttgctatgtcacttcctgcctggatcaccacttatctactacatttcccagaatcctttttgactaatagtcctgtctaacttgctgtctcactcaccaaacaatcaatttttatttaacaattttatttaacaatcaataagataaacatacacagtacattccccatcaaagaacatgctatgaaaagttttcaaatccttacttatttcaatcatgttagtacatcaaatatttgaattttttccaactttttttatttgaattagaaacaggattgttttacatgacaaacccagttcccttttctcacccatcctcccgtaccaccaccctcaactaaaaccctatataccacatatcctttctgctccccctggatggcgaggccttccatagggtgtcatcagtgtctattgtatcctttgagatatggatgtctttgtatgttctatgtgttccaatacaagtctgtgtatatatgcatacacacacattttaatctctaagtatcatggttgattagctccaagacatgaaggtgtaaatatattttataaataagcctcatattagcaagtaatttagtcataatctcccaatattgctttgcatacattatctggtagaatgtaaatacattacaagtcactcttaaagagtctattcatgttttatatggatgtgttacttccaaatagtttcaatatttcaaataattaattgagctatagagaataaactggattgtgtacaaaagcaaaataacaactgagtttgactttaattataggtagactcaaaactcaaataaaagaataaaatttatcttataattcataaatttcatgatgtttgtaaaattacattattattttaatatatttataatgtaactcttgactaaaaatgtgatgcagtataatttatttggtcatgtatacatggtacttactgtaaagcaagtgtctttacataagatatatgcctcacatttgctcagtaactccagctttgagctaacaatcatactttgcataaatatgtttctatggaaggctgaaaggtatgctactagctttaaaaagtggtgttatgggtaagtccattttatttgttatttaaaaatatcatgtaaaatttcaatacccattaatgtggcaaagcagtttaacaattctctttggtatcaccaaaattcatgtttaaaatgcaagaatggatggcttcttttcctcttgtatctgagtaaaacactcagatttacagaatctacttgggtctctatggaaactgtcctgccttccaagtcaatagcatttttgttgtgtgacttttacacaatcctctttatgaaacaattcaaggacaaaaatcatgtgatatatctcaagtagtactttaaaattcttcaagtgtatgaattttgtaataaatatatacagagataaactgtttttgcaatgaatgtggttcaaaagtcaaagtaaaattaaatctatttagaatatataaaatatgatgcattgatacttaaaacttcatttgcatttaaattgatattgttaatgtataaattagattaccttgtatattgtaaagagttaaaaaatcagaacaaatcatttaagagaatgtaacattgaagtagaagtcactttactgtaaaaaatatattttatattttatggaaaagtaggataatttatactgatgtgttttcattgtttactgaaaataaaagtgatattgaaatatgttgacactttgatattgtgtcatattaacacattgctttcttggaattaactggaatcttattttcctacacattcttatttaattcttctctcttgtttttgtgttaaagttgccaaaagtgcttttgcataatttaccttgaaattaaaagttcacttaataattagtgtttactaaattaaatatcactatttcatttggatgtgttctttgaattacctacaactaatctgcttaaataatttttaatatgtttcaaaaatatataaagaaaggttttaaagcatttaggccttgaaaatagacaaataccctgatacactcagtagtcctctggctgcaaacaaaaaaggaacatggctgaaaggattcctgaaaactatattttcaataacatctaatgaatggacacacattcacttaagaatgaaaatattattaatgagaccatgaatttggggttattagtataattaaacagattcctattcactaaaatagcacataatgtgagaagttagaatttcagaaatttgtcaataagacagaatgtagagttcaacattcctcatatgtggaataaccttgtgaaagctgtaagtttttattttgtttctgtgaagtcctcagataacatggaatttaaaaagggaagaagataagtcagatgggcaatctctaggaatattaaatgcagtcaaataatttacagtcattggtatgctaatttaagaatacaataagctgaaaaaggattatgaaaaggcttcatacctacttatcatgcatacatccccagaaaaataaaaatacagatatttattcaactttgtgttactatattatttatgatttattaaagcttaattgaggattcaaaaagcaaagccagcctcaaactctagaggtaaggcagtggtggtatacacctttaatcccaggatccaggattaagatgtaaaaggccactttgactacacaatccagtcctaaaagaaacatctcacacaaaggctatcttagtacctgggatcacagtcctttaatcgaagcattgggaagttatagaagacaggagcagggtctcagagctggcattcactctgagagttagtctctgtcacattgaagacaaaatagcagtctgagtgaatatgaggagcagttcaaggataggccctttagtctgaacatagaggtaagaactagtgaccagctcttttgttattctgatcttcagcttgaagcttgaaccctaatataagtctctggattttttatttatcatgtttcacaatttgaatacttcttcaagagtattgaagctgatatgatgggggctgtccttctgtatatatgtttctctcattggctgatgaataaaacactgtttggccaatagaggcaggaagataggcaggactagaagatgaggagaatcctgggaatggtaggcagaaagagaccaaggaaaggtttcacattgccaaaaggagtaacaggtccaggcattttctggtaagataagaccacttggaaataattagattgatagaaatggattgataattaggagagagctagacagtaagaagccctagccattggcaaacagtttataattaatatggcatctctgtgtgttcatttgtggcaaggcagctgcaggagcaggcaggacaagaaattctccagttacactgcgattgttttaaatggtaaaacatttaatgtgtcttttccaacttgtagaaaaaagtcaaagatacctgttcttaccacttactctcagtagttggatattcttgacattataaatggccaatggggggacataaagcacatatggttcatgaagaagaaataaatgtaacccagtttccaaatgacatgattactaacacatgtaatttaaaggatttaaattaactctctgagaggtagtaaaatactatggtaaagttacaaacctcagacaagtgtgcaaaactaaatcatgtatctatgcactagcagaagatgcagaaaaaataataaataaggaaaaatttaaagtgtaatgccacttagaatttttcagaaggtaaatatgcaagaacaaatgtaagtaaaaagataaaacatttataagcagattatagggtcacagtgaaagataaaagatttctacaaaaggagagacataaggtgtgaatgtcagacaatttcaatatgtcagtgatcacaatttgatgaataggtttattgcagggcttataaaatttcaagtaagaatttttgtagtcttacacaaaattattgcaaaagttttatagaaggattaaataagtaatattatgaagcactctccaaaaccataccaaagtttagcccaatgaatctataatattcaagatatcctatcaaacttgaatccacaaagctttgtggtattcaagaagaggtgaaggcctgcacaaatggaattgcaggaggaacccaggactggactcacacagttcatccatcacattttacagaaagatatagaagagtttagtgtataagagacaacattctgggcaaacgaacctacagcaagtaatcggtcatagatacaaagatgaactttgatctgctctacacttcatacaaattttaactaaaaataatcaaagcaaaaaatgtataatgtgaaattttaaattttcacactagtgaggaaggaaaaagtgtttagaatctcaggcatacaaagttttctaagacttgcaactgaaataataatctataagaaaagtattgcaccaaaattcaaacttttactagcaaaataatacaaatccatgacaagaaaagttactgacccatagaaaatgattttaagccatgtattcattaatgactactacatagattataagtactctatcaaaatagtgaaaaatctagacaattttattaaaacataaatagagtataggaaaaacatttcactaaagatttgatatagaggcaaataaatacaagaagccacataaaatttttctaactgaaaataaaacatacatataactatttatattgtattaaataaaccttaatattatttaatatactggatttaattaatatattaaattaaatacttttaaattactaataatgcatgctataattatatgcataaatttaaagtggaaccaaaattagtatgaataatatattatgcataattaaatactgtattaaatatattaacatattcatacataatgaacacatttgtatgtatatacatgtatgtaaatagaccattatgaaatacacatataatgtcggtcattggtagtgcatgcctttaatccaagcactggggaggcagtggcagacagatctctgtgagttcgagaccagcctggtctacagagtgagttccaggacaacctccaaaaccacacagtcagtaagacaaaatgacagcccatagactgggaaaagatattcaccaaccctacatctgacagagcaaccccacatctgacagagggctgatctccaaaatttacaaagaactcaggaagctagtctccaaaacaccaaacaatccaattaaaaagtggggtacagaactaaatagacaattctcaatagaggaatctaaaatggctgaaagacacataagaaagtgttcaccatccttagccattagggaaatgcaaatcaaaacaactctgagacaccatcttactcctgtcagaatggccaaaatcaaaaacaccattcatgctggagaggatgtggagaaaggggaacacttctccagtactggtgggagtgccaacttgtacagccactttggaagtcagtatggcgactgtcaagaaaatgggaatgagtctaccacaagatccagcaattccactcttaggcatatacccaaaagaagcacattcatacaacaaggacatctgttcaattatatttatagcagcactatatgtaatagccagaaactggaaaaagcctagatgtccttcaaccaaagaatggatagataaaatgtggtaatctacacaatggagtactactcagcagaaaaaaaaaatggaattttgaaatttgcaggaaaatggatgggattagaagaaaccattctgagcgaggtaacccaatcacaaaaagacaaacatggtatggactcactcatatatgaatttttgacatagtataaagaattaccagcctacaatccacactgccaaagaagttaataaacaaggagaaccctaagagagacatacatggtcccctggagaagtggaaagggtcaagatgtcgtgagcaaattgggagcatgggaacggggcggggggagctaggagactgagaaggggagaagaggagggatgcagaggacatgtgggagcagaaatattgagtcaggggaagaatagatgataacaagaatggagataccataatagaaggacacatttttggtttacagagaaatcagacatgaggaaaatgtctggtgatctacaaagatgacaccagctaacaatcttaagcaaaagaggagaggctaccttaaatgccctccactgataatgagattgatggctaacttatatgccatcctatagcctttatccagcagctggtggaagtagaagcagactcccacaactaatcactgagctgaactagagcccagatgtagagaaagacgagtgaagaacaggctggtgaaacccacagaaacagctgacctgaacatcggggaactcttgctccctagattgataactgggataccagcatgggactgatccagaccccaggaacatgggtttcagtgaggaaacctcagaaatctatgggacctcatgtagaagttcagtacttatccctggtataagtgtggactttggagcccattccatatagaggaatactccttgagccaagacacacaggggtgggcctacgccctatcccaaaggatacaatagactctgatgacaccctatggaaggcctcaccattcagggggagcagaaaggatatgtgatagatagggttttagttggcagggaaggagaggtagggcaggacgggagggagaagggaactgggattgtcatgtgaaacaatcctgtttctaattcaaataaaaaaaggttgaaaaaaaagaaaaataaaaatacatatattatacataaatattttaagtgtcatcaacagtacttagaagaatatgccaaaagcaatttatgtatctatcactagtgggaatacagaatttaatacacattcagggaaaacaatattccaattgtcagaagaactatacagccactacttggcctagcaattgcatttctcagtacatactgcagagaaattaagaaatgtttacgtacacaatatatgaatgttatgatagcattttaaataatgattataagtataagacatcccagctgttatttagtgtgtaaatgcttttaaaaagacatccatatgttctgtaaaataatctgtagcatcaaaaagaaataagtgttctagattacattctaattcctaaacaaatacagtaaatggaacatggtgaaattcacatactgatggcttatacttatataatgttaaaatgaagtatcaaaattaaagaagatgttatgaaatcagagagacaaattccaaatacatactcatatgcacacatgcagacacagactacaatgctgtgattctttgaagaaaaatatctaacggaaaaaaattgcaattatcataacatttattaaacatatcaatgtgtatcactctaaaaattttataaaagttgaaaatgcatgcaaaattttgaatttgatatatacttggggaaattgaaatatatttaaatataggattataggttactatgagataaatgaattgaacttcacttatgagcaaatatttcgaaaaacatttaaagccatactaatttagctcattgaaagtaatgagttcttgagggtttcattgtcttcagcaatatacttgcttcattgttcagttccaactcatgatcactcagggagcattggttaaacacagtgaagaacaaaagaaaaccaaagccatgaataaggaaactggacttgtaagaagaggtgaagttaacaggcatggggaaaggaatagtaaggatgggtgcaggagtaatcagaatacattatatacatgtaacaaattgccagaaaacaaactcaatggatgtttattttattcaaagagaaagtaaatcacttattagctataggatgttggctaattcatagaacctttcttctgttttgttgtctctgagtgagaaaaatagccactcctataacaatggaaattgtgggaaatgtgtctatgaataatgcgtgtggaagggagtgagaaaagtcagaacatgggctatgtaaatcttaattactatgatgataaattaggttcctttcctcttgggcatttgactctcattaaggatgtgtatagtgactttgtaggtctcttttataagaggtaatctataatgccaacattgtttctgggtaaacttgcccaataaaattgacaaaatcagattcaggtttttggatgagtgcatggtatctgtagaagatctttcaaaatttgttccacttttaaggatattatacagtaatgcaattttaacttcctgactttgtatgttctaaaattaggagttgcatacgcaactaaatttgaactaattttccactccccctcattacactatttcagcatgaatggccccttatgctttcccctgtttcctgatacagcaccaagggaacatgcagtcaccaagggctcatcctcattctaaacaatcattgtttccttgggctaagaaattctattaatcagatgaagtgtctgacaccaaatcacatgatatggtgttgctttgctaccacctctcaaattctgatcactcagatcactcttcatcaagtttagctaaccatatgaataagtgctgcacacgtttgctttgttttcaattttttcagctcattactttatttgacaaatatctactgaggtactctaatgggtcaagtgaatctccaatgtactataaaaataaacccaaatatcctgaagataattttatttactcattaataaatgagaataatctgcacaaaatggatattaccaaccagaaatgttaaacagcaaatacgctcagagaaggatgtaaaatatgaataagtaggagccatggaatctatgtgagaatacacaatgctatgcattggtgttgattccaaaatttatctgaaatattttgtgagaaatccactactgaaaccacaacacaataattataggatgcaaatatgaaatcaaatacatttataagtattgggagatacagtatttaagaaatatcagctacctaaaaaacagagtcttgtatttccaggtttcaataagtttatcataagatacataagatacaataagtttatcataagattcaaaacactttgaagtacaggatgtttaaacacttaaaacattggagagatcactaaaacatttaaacacaattacacacttaaaaactagcaatttcctatataaattattacaagttataatattttgaataaaaaaagcaaaagtacatgaacctagtctgcagaaaaacttctggtaaattagtctgattatcaaagaattgattccctataattaaaatgcttgcaagtatatattatatagaactatacaaatatgtaactttcactcaaacaatattcaccattattgtttgaaaataaatataatacattgaattcaatgtcataaaattgcctttaaaggaaaagtaattcaaactatggttcgttttgagtttgtcttagttatggtttctagtgctgtgacaaaaactataaccaaacaaccaaacaaacaaactgggtaggaaagggtttctttggtttatacattcccataggtgttcatctctaaaggaagtcaggatagaaacttaagcagggcaggaacctggaggaaggtgcagatacagaaaccatggatagatgctgcttaatggctagcttccactgtcttgttcagcctgctgctttcttatagatcccagaacccctaacccaaggatgacaccacccaccctgggctgggccttcccccattggtcacttcctcaataaataatatttaaagaaggaaggaaggaaggaaggaaggaataattggattctatcagtctttagagattggatcactaattaagaaaatgccttactgctttatctcacagaggcatttcctctgataactaaagcatatatcaacttgacacacaaaaccagccagagttgctccggatatggagagatatttaacattcaaatgaataatatgaaaattccagctgaaatgaacaatgatcaatcaaacatcccttcaaaatttaaaaataaatacttttaaatatgtgcctcatgtggaaatgaagggaaatgtttatcaaaattttaatgcctctttggccttcaatctctctctgtgtacaactaactcatcttttaaactaagacaagacattttgtggtagagtttgcaggacttatatcactgccatatgtcatctccactgctagctaactgatgctgaaaaaaaaccatttatatatgttgtatgtgtttatcataaatgtggtatccaatatatcacaactcactagtgctgccattgtggcatgtgttggtgctgactaattagaattgggccacagtcttggagaaagatgatttctccacgactgacaatgtacatctcccacatggtggaaggtatacactggcttctacaggctgttctctgccctcacgtgatgtgttggcatattccacactcatatacccacactcacacacacccatacatagtattaaataaggaaggattgaaaaataaactctaacagtctttacagataatataaactttataataaggatatacttacagtaatttcaggtttttgtcactcttattatgcagaagggcaaaataatttcataaatattgcctttgctgaaattcaaagtaaattcttaaaagaaagcttaagcatatgtagtttgatgtttctcatttccaaataaccactggaaagcttaacattaattacaattgtttggcctcttgctcaggcatattactgaatagctatcacaattaaattaacccatttttaatctgtgtagcaccacatggtcttggcttaccagtaatgttctgccatttaactccttctgcagcaacgtggcatttccctgactctgccttatttctttctctgtctctgtttggatttcagacctagctatattttgccatattagaggacaaaacaattttattcaccaaccaataaaagcaacacatatttgaagtatacaaaaagatatactacatcatctcccttttttctaattaaaaggaaggttttgactttcacatagtaaaatcatgcataacaaaacaattatcaagcaaaaattatagttacaatatttagtatatttgtacttggcaaaattaaataaaatatcctatctctatgactcaaaagttttatatctaatgtatcttttatcataattaaggaaaactatgactgtaagtatctgtcttcaactcgaggaaagtcaccagaaggacataatataacctaagtaaactggaagtacattataagtaactttcaaaactcttgaaatgacagagacatctggctgcccagacagtcacccaaagttctgtaacattagggcatccatcttcagcctataggcctagagtgtctggcacatttcttactaaagcaagaactttgaaggactttctcacctattctggcaaaatttgtcagtcactttattctatttactgtaggatttctggaaaactttcatgaaacagaaaccctgcaggactgtcacatcttgtttaggaaaatggcaaatggatggaactcgaagaaaccatcctgaatgaggtaacgcagtcccaaaagatgaacatggtgtagtcactgatttatggattttagacatagagcaaaggattaccagcctacaatccacactgccagagaaactagtaaacaaggaggaccttaaaagagacaaactttgtctcctggacaaggggaaagggtcaggatcccctgagcaaattgagagctgataagctgggaaatatgatggaccccaagagagacatacatggtaccccagagaaggggaaaggaacaagatctcctgggctaattgggagcattccgggagggaagagggatttaggagaaagagaagaggagaagaagggagaggaagacatgagggagcaggaagattgagtcaggggaataatcaaggagagcgagaaaagagagataccataatagagggagccattataggtttgaagagaaatctggcactagggaaatgtccagagatctacaaggatgaccctaactaacaatctaagcaatagtggagaggctaccttaaatgtccttctctgttaatgagattgatgacaactttacatgccatcctagagccttcatccactagctgatggaagcagctaaacactgagcaacctcctggaatccagttgcagagagggaggattgatgagcaaaggggtccagaccaggctggagagacccacagaaataactgatctgaacaaggggaactcatggaccacagactgatagctgggaaaccagcgtagaactgatccagacccccttaaaaagaatatcagatgggggtgtgggcaatcaatggggcctctggtagtggatcagtatttatcaatagtacaagggagcccactccacatagggggatactctctcagcctagagacacagaggacggtctaggccctgctccaaaagatatgacaaattttgaagataacaatggaaggcctcacccttctggggagcagaaaagggatgtgaaacttggggtcttgtttctaatttaaatttaaaaaagaaaaaaaagagataaatatgttgcttttgcttagcagcccccacaataaatgcatctctgcagttagctcattaacagtcaaaaattttgaatacaataatatacatatttcagacattatatgtattttctattttacatgggccactataaaatttaagtctattcatcatttaagaacctcaggttattatccttaaattatttttttaatctattagtctgtctattgtatcctccctcttccaagaccatgcacacttttcaaacacattgtgacttgtttagaggtctttttgcctgcatctgtccttattgtgtgtctgtaaacccctactgacaagaagagttttaaaatggtaaacaagcttggataggcctaaagtggctggcttcaacctgttcattggtttccctagagtctaccttcatggcagaggcactggcaggagccgcgtgtattacctccaactctggggaggttttaggtccatactgttagctgcccatgaactacatgtttggaagcagggcctcttaaaaaaggcaagtaggcctggtggtggtggtgcatgtctttaatcttagcactggggaggcagatataggtggatctctgtgagtaggagaccagcctgttctacaagagctagtttcaggacagcttccaaagccaaatagaaaccctgtccccccccaaaaaaaaacaccaaaaaaaaaaccaaacaaacaaacaaacaaaaaaaagccaagcagtttttgctgctaatgctgagtaaggaagctgtctcttaaaggagtgcccctctgttttcctctagcaaacagcctgtctgagaaaatggtgctaccaagaagccatacttggccatgtccttttgtgtttagaaccctttgtaagcttttgtcaggttgtatgtggatattcgtaccacaagtttggatgccccatgtacttggaggctcctcagccagccctccagtgcacaaataatcacttagggtttaacattaattaaaattttgtttgtttgtccaattgctcaggcacatactgactagctttcacatttaaattaacccatttttattaatctgtgtatcactacatagccttgacttactggtaaagttctggcatctaactacttctgcagctacctggcatttccctgactctgacttctttctttcactatctttttttggatttgttgcctagctatatctttcctgccataggccaaaacagttttattcatccaccaataaaagcatcacatattcacagcaaatagaaggagatcccacatcaagcataggtgtgattgtgtgtgtgctagactgtacctgtatttattttattagaattgcagaagaaatagtttcagaaaaatagcttggcaatcataatcttttcaattttataaacataaatctcaaagtaaaactttgtctggatcagatgaattaaaattcaatacattgtggaaaataatgatactctacttaagaaaatcatttacagagactagagaaggagaaatataagtgaaggaactaaaaaagaacatcactttcaccctgcacaaaacttaagtcaaaatggatcaaagacctcaacataaacccagccacactgggttatgacagtttatgctggagaggatgtggagaatgaggaacactcctccactgctggtgggagtgccaacttgtacagccactttggaagtcagtatggtgactcctcaagaaaatcggaatcagtaccacaagatccagcaattccactcctaggcatatacccaaaagaagcacattcatacaacaaagacatctgttcaacgatgttcatagcagcactatttgtaatagccagaaactggaagcagcctagatgccccacaactgaagaatggatggacaaaatgtggcacatttacacaatggagtactactcagcagaaaaaaaaacaatggaatcttgaaatttgctggaaaatggatggaactggaagaaaccattctgaacgaggtaacccaatcagaaaaacacacacatgatatgtactcactcatatgtggattttaggatcccctgagcaaattgagagcatgggaagaggagggagggagttatgagaatgagaagggaagaagaggaggatgcagaggtcatgagggagcagaaaggttgagtcaggtgtagattagaagaaaggatatgtgataagtagggtttttagttgcaggggtaaggaaggaagggaggaataaggtaactgggattgtcatgtaattcaatcttgtttgcaattccaataaaaagaagccattaaaaaaaagagcatcacatagagatagccaatttgatttctatgaaattgaaaataaaacagaaatggcaatgtatcaaaccactgtttggctcaagtgtgtgaatttgggaatgcagtgcatgttttctggagatgctggtgcctatagctaagaccactcccatttgttgggaaatagtcatagggaagagaaaaagaaatagagaagacatgagaatcttccatttgggtctctgaactggggatgcatgctgctttgtatgggcacctcagtgactacttagagctttgccaaagtgtaaatacttttgctgtttgtaagtagtgatgtccttcagtaaagaagtgaatcttatgtaaaccattagaaacatttgtttcttaatgattcctcttacatgtgaaaactggaatccataatcattacaattcttgtttaattcctcagctatttttatccattatgatacatttccaaactcatgtttgtaataaaatataaaatttttcaaatgaaaacgtaaagcatgtcagttaatagcatgctacatatggtcttacatagtttcaaactttataaatacaaaatattcatgtttgtttaatttgttaaaggtttgaaacattttacactttagagtatatttgaaaactatgatgttggcactagaaaccataagttgtaaggttgctcctggtcacttcaaaccttcagtgcagaaatgcaacttgaactttataacactcccctgtagagttttaaactatggtccttttctttttctcccattcagttcacacatactcacacaggtactcagacaagtaagtttagcttaggaattacattaaacaaacacacagcacacattcattaaatatggtaagaattaatccctttgattagtttagtataggctaatatttaggtgaaaacttaaaaaaaatctttttatgtcattatttgtaatatcaaatatgtgtgaggtcgcataggatatatgtgaaaacatgttttgtagctcttttactgatttacccatacccctgttactcaagtggaaccttgtagcccctcacccccttggtctctttttaacattcttatcccacatgtcttaatactcttcctcatctcctcatattagtttttatggtgatgtgaataagaatgacccccataagcttttttatttgaattcttagtcaacagagagtgacactatttgagaagatatctggccttgttggcataggtatgtgactgttaatggaggtatgtcactggggtagcttttgaagattcaaaggccaggcccactttgctctgtatggagaactctcagctccttctccagtaccatgtctgcctgctgccatgctctcctccataatgacaacagacttagtctctgactctgtaaccaggtttctgagtaaaatcaaatttctttgaacacatttggaaaacttaataggaaatgtgataaatctgtattctgcattcttgacctttctattctattattattaataacaaaataatatgtgtgagaacagggtgctctccaagccatcaatgacagcacaggcattatcagttagttctgcttttcatttctttagattattcatgccacattctaattgtggcttgaagtgttttacttttatttaaattgccatcagaaatttctaggcaaaaaaaaaaaacactgattaaagtgaattcagaataaaaacaaatcaaatgctgaaatttccatgaaggttttcatttgatgttggaacgaagtgccagttcaaagaattttgtggttgatgattattatcatttgcagccagtgtagaaagaaaggaaaaatcttgagcacaagagagaaggaaaggaactccttgccctagaatctggttgatatctttgccagccacaaaaatgtcagctgctgaagtccagttttgcttcccagacaagaacctgtggttttctgtacccatttgagctacagcttgagagcaagaaaaaagagttcatagtttagtgctaagccaatcctttctttactctcctttggggaaggagcccatgctcttacttaggccacctttactcttccttttgaagcacatactcccaataaagtctatattctttccttctgggcacgtctttttctcctaacttccagactaaatcttcccattgagattgtcctacagcttaccggattacttcccatggcttgctcagtctgctttcttttaaagcccaggaccaccaacccagggatagcaccactcactgtgggctaggccctcttgcattgatcatgttgagaaaatgccttatagctgtatctcattaatgtgtgtcctcaactgagattccttcctagctgaggactctagcttgtgtcaagttaacacacaatactatccaatgcaaaaggttaaccctctaacgcactagttaacacctgccctccatggctcctaattccagagggcaaattctttgaaatctgaggataacacaaagaaaggaaaacttgtcttttaaagcttgctcttccatcttcatttcattcagctgtgctttatttgaatgagtgtccctatcataaaatggtggaaatgtgttgttgctggaatacccagtattcatgttaactgtgctcatgtctctctctgccttctgttacagatgctgtgagttatggatctcagtcctacctgtactgttgtctcctttaccaacacttctgataacagatatgggagagtaaactagagactacgcaacagagtgtcttcttttcccttagccaaatgatgtccgtgtgtgtgtgtgtgtgtgtgtgtgtgtgtgtgtgtgtgtgtgtgtgtgtgtgtgtgtgagtgtgtgtatgtagtaagcaaccaaggactaaaactgtacattgtaaactactaggctatagagtcctgattaatgtactttggcttcaaaatagcatctttaaagtgatggatatctgaacaagctactcctggtcatttcttttggtgtttccttcctttcatatgaacatttcatcataacctcctttaaagtcctgatatgttgacataatctatttactcataaactgagtttggtgggacaagcctatgatcccagtccttcaaagatgaaggtatcttagccagggctatgttggttttgtctcagacaaatattttttctaatccctattttttaagcttagggtaccatttcagtctaaggatttcctgaagcaatttgcatttcatatgggagataagtgacatagtgaattcactctgctgaatgcaccatagtcaccactaaggagtaatcattagatatgagaaatggtagcctacagttttacagtaaataaattgaagtggctttatattatgctttgaaaatattcatcttggcatggtagcatggcacacatatttaatccaagtactagagcctgaaacaggaggatcatgagttcaaggactccctaaaaagcaaaacaagagcaaagcactactaattattttttcttaaaattttgcttcattcacttagtgatcattcataaatcatccccatccagtgaaaattctgagagatacttttctcaacttttgcccagtgaaaatctagaggatgaattctagattgtgcttttgagtcaataagaccccataaatatagttaagctgaatattgggcaccaagagctttctcagtttttgtttttgaacatacttctcctttacttagaaaagcattagttttaatgaaaaatgaaatacctagtaatcttaaaatacgatgtttttttttttttacattttcatgaaggtcacagtatgctttgttaatatttattttgctgtactatttgtgatctatgagtgtgagccacaatttgtatcccctccctaattcctctcatttctgagctggcaagtaactgaacacagtcccaatcccattaacccagcagagttctcttcagttttttctcatgttgtctgtagttttctcatgttgctgttttggtttttcattatccatctctttgtattaaaacaatagcagctcaaaaagaagtagtagtgacatcaagacaactttcttccagtgtttccttcagaactatgagctagagctatgtgactctcaccttgcattgcttacatacaatgacattttactataaagtcatgatccaatcataaggcaaggaaacaaatactgttaaaatttgcaaaatcagtcttatgaagcaacccaactatgtctttataaccaaagtattcaaggcaaaactgctttgtacatcagttttcatgtactctatatcaacaaagaaataataggttctgaaaattatataggtatcatacaggtttgatttatttccaccaagagaagaaaagtcttcataaacttctgagagtttctcctgcctgttagtgaaaccccatttaacctctgatttacaaactatctagcatggtaaagtgatctctaaaggtttaaatagcatattgaattgtcatatgaagtgataggatatgctgttcattcagcttcctggtcatatttggcagcttctaccttgttcaaaaaatacagtctctccatacctcttcacaaatactgtcattctgaagtgagccaatctacttaaattactttctaacagcatgtgacatatgccacaaaaccaatatgtattcactgtttcattgtcatcacccctacctctgaattatcataaatggagtaaattgtttagaaggctggcataggatagaaactgcataaagaaagtgttttactaaagcacaatgcacatggcccttaagcaactcacaaccacatgaattgggattgaaatagtagaagaaattacacacagtgccctccgaacatctcttctgcagtgtgccgtcacaggcaggagtgtcttaatcttacctaatgtttatctcaggttcctgagactcatgtttgctgtgtctcacaaaaatatcattgcatagttgttttttttcatagcattgaatgaaagtgcctctccacacacccagtactgactgactttgtcatgtattggttgttgattttaatgtggtatactgcaccaggctttttcttttgggttaacaccagcttccaaatcatttctatcctatgccatgaagacttttagcttaaattgactggtttctctttatgtaccatttgcttcagagcttattaccattcttacttctgtatgtcttacattccctgcttctctatatctgcctggctggcttctgcttggcttcttgccccaagcatgtcccttattctctcctctcattcttcttctagaggtgagatttctcctatttattctctctccctaccagtgccacctgtcctttctctgtctagctactggatgttcagctccttattagaccaatcaggtatcttaggcaggcaaagtgaaacaactgcaacacatcatttcataattaaacaaaagaaacattcaaaaagtaacacaactttacagagataaagtaatattctgaagcataaataaaaataacaatccttgcctggctaaaataatactctacagcactgtatttttgcatttttgtagttaatcctcaacaggtgatttgttggcatgaatccttctttcaaatgatttctaagaacactgctctgcctgtaaatattccactgggttaatacattctttcttcaaggaagttttttgaaagcctaaatatgtgatcatatattgttttatttgtttatttgtttgtttgttcattttattcttctctcatatgatacatccagacaacagtgtcccatttctccactctccagtccccaccttccctctttcctagattcactgctcctccatttctttttagaaaagagcagacttcccagagatatcaactgaatatgacataacaagttacaataacacgaagcaaaaacctttatgcaaaggcttgatgaggctaccccagtagaagggaaaggatcccaagaagaggcaaaagagtcagcgatagccccagagaccactgttaggagttccacaaaaatccccaagctaaacagctatgtaagtggagttttcctgtcccaactctctcccaaataactggcaccctcttcccaaataactaactcagagacataacataaattataaatgcttagctgatacatctggattgttactactgcttacattaaaattaacacatgcttcttatctgtactttgacaagtggtttgtggtttcttacctcattttctccacattctgtttccttggtggctggctggcatctcctttgactgcccttctttctcccatcattctcctagtttggttgtcctgactataattcctacctggatactagccaatcagcttttaattaaaccaattcaagtgacaaatctttgcagtgtacatagggattattctacaatgcagctacagaatctttgcagaggacctagcctagacccatacaggctccatcactgtcacttcagtctgtgtgagcccctatgggcccagcttagattattctgtgatttgttctcccggtgccttttgggccctggtccctacagtctctcccctactgttttgtggtgttccctgagctctgcctaatgtttccttctgggtctctgcatttgctcccatcagctgctggaggaagcctttctgatgactgttggactaggcacttatctatgaatataacagataatgtgctcatatttttaatgtcctgtttgttctggaagctgttctgccttttccatcatcaaccataaatacctttgcttattgatgaagagtttctgaccttacactctgacacacaatgtattgatctatatcttttacctgggttaattgttatgtattgttgtttaggtaggagtcagttcttttcctctaccacatgggctcctggggttgaaactgggttttcaagcttcgtggtaattccctctacccactgaaccaacttactagcccatgcactggaatatatatattagatgaatttttagaaacatgttgttttagtttgctttctgtttctgtgataaacatcctgaccaaaagcatctacagcgaggaaagggtttattttgcttaaaattgtcaatcacagctgtgagtagagtttttctgtgtccaatcagccactcccaaataagcagactgagtcttactattgattacaaatgctcagtattctttattttactcatttattattattatcactattattattatttgttttgtgagaaacagtttctctgtataacagctctggctgtcctgaaaattactttgtacatcaggctgtcctctaattcacagagactcacttgcctgtacctacagagtgtggggattaaagacataggtcataacctccaagctcatctttctttcttaaacatcccagaataactgctcacagaagataataccctgaatggtctagtccttaatacatcaattggcagtcatgaaaacaccacatagaaatgcctgaaagccatcgaagtgacaattgttcaaataatttctcccttccaaggtgactctagttttgtgtcaacttgccaaaaactaacctggacacataatttatctcattacaaatatctgtaattagtgacttttcctgggttctagaatattcttttgataatcacattaatattatttcataccatcttttagtgtgattcttgtgggctgtacagattttgggagattatcattagaatgttttaaaatttggcacatgttcagaacaatacatataaaaccacatacacacatataatatacataatacatatacatacatacatacatacatacatacacacacacaaacacacacacaacatacctttagcgtagcagaaaataggtgcttacaatctgaacctatcaaggaaattaacacaaaaaatactataggtttttctcttgttccaatatatcatcttaatttacaaaatcatagattaattataataagcctagcagatttgaacctaggagtcaagaagagaactaattaatttcaagacggttttgcattttgtggtcagttacatgttctgaaggtctatgcttcacctataaatgtttctgaacaaaattcaattcattctcaatgactgcagttcctatatattgaagttggaaaccaagcacaatactcattttgtctacaaggctctgatttagtgggattccactcttcagagtcttcaagtgtgctaactgtgaacttgaagtgctaactctctgaggaggcacagataatgattcatgggactaggctcaaatataggttaaatatttttttttggagaagtcacttacacaagaagcagatgcctgacacaagttcccacacaggctgctccctgtgacctgaccagacacaagagagagccacctgcctcactacctgagcaaatgggtatggtcagcactacaggtgcaggaggggtggatatctcactacaactttcagataccaatagatttaaaacattgttttcaacagcactccaaaccaatattggcaaccattatataatatatatgtaataatattataataatatataatatatttaatataatacaatatatatgtacatatacaatatggcaaccattatattcatcatattggtcaactcagttttgcccacatgctgcccacatgctattgctcctcttcaatgttgtgtcagtaatttctgattacaaacttaaaatgttcagttaaaatttgtatttgagattgtttagactttttcaaagtactctaaccatctggtttccttcttccaaagacctctggggaacctttctttgtttaacacacagcttccaaacattagcaagaaatgtaaagagagtataaagggaacataaaggaaagaaggcatttgataaagctgaatactgtgtctaatttatttccacagctattgaagtagaatggaggaatgaaaattaccctttatagtgcagaagtattgtatacataggaggatccattttccacaaaaggaggagtgttctttgcaaaatagccaaacaggaaatatattccctcccccatgaatcactgcttctagagcaacgtcttgtcagggacagtgtttctgctgtgtaagctcaagcaaggaaagccaatttacctttctcttcacaagagtattcagcttctgtgatactaaccagatatacatctgacacacaaaaacagcatcaaaataaaattgtaattacaagagcttctgtcagatttttagtaagttagagaaattataggcaatttgtaacccttaaataatcaggagacatgatagcttgactatgacaaaggtcatgaatctaatagaaatttgattgaataaatgaggcatccagttcgatattagaaaacaatattagaaactttgagaagtagggactttctccatttgcttgttttttaaacccagttctctctccctctccttccctccactaatcacccatcacatcccccttctgcttcccagggaaggtgaggccttccatgggaatagtgggaaattaccaataccgataagggtatttaatatggaaaagccttacttacagagcgacctagccagccggcgaggcagcattttgtacacaagcccaaaagagaaaacgcagtcaccatacatccccctgaccacgccctagaaagcgtggtcaggcacacctgtagccagcccctaagtaggtgtggctacagcttcccctacacatggggggaatcttcaaagtctgtcatatcatttggagtagggcctatgccctccccatctgtctaggctgtgcgagtatccctctatgtggagagggttcccaaagtccattcgtataatagggataaatactgatctaacacaagaggccccatacattgctgaagcctcctcaatgacacccatgttcagggggtctggatcagtcctatgctggtttcccagctgtctatgtagggcccctgagcttctccttgttcaggtcatctgtttctgtggttttcaccagcctggtcttgactcctttgctcataacccctctctctctgtaactggattccaggagttcagtccagtgtttagctatgggtgtcttcttctgtttgcctttttgataaataattatgggaacataaaatcaatataagccaaaactttcctttggaaagatagggttttcactttctggagagactatcaaatgagaacagctaacctttctttgaactctaattaaaagaccaagtctaatatagttaacaaagataaatcttctaagtcttctgtggttctttgtttttaataagaaaattcaaaaaatataattagggttatttctcaataagtgtgtccttaattacatctcatatcttaaagcatctggggtatagcttcctacagcccgtcacacacacacacacacacacacacacacacacacacacacacaagcctcaaccacattttctgtcactccttgcttgatagactatagatccacaattacaacttttttcccttaaacatttttttatttattcaaagtaagaacaatcttattttacattaatccaagttctctctccctcctgtcctcccatgcccctaccagacccccatcccacccccatacacaccccagggttggtgaggcctcccatggggaattatcaaagactgtcacatcacttctgtcagggcctagatgcttccccatgtatctaggctgagcgtgtatccttctatagggaatgtgctctcaaagtccatgcactaggtgtaaatactggttacactgccagaggccccatagactgcccagacctcccaactgacaccacattcagggaacctgatttggtcctatgttggttcatcacaccagggtccatgagcacccagttgctcagatcagctgtttctgtgggtttccacagcatggtcttgacccctttgctcatcactcctccctctctacaactgaattccaggagttcagctcagtgttacaagatttaaaatgaaattatgaatgaatcatcatacaattgggaaacttaaaaaatatggaatctcagtggagtgagaattaggtagggaatactttacaaaatgaagtctgttttcttttctttttcttattttgtttatttatttatttattttctgggaggaagttagcttcagcagctagaatagaaatacttgacttcacaattgatccattttagctactcagtggtaaccccaaaaccccaactatggagagagcaagtgtcaacatatagattaatacactttattgatgagcaaagagctaggttgttggaaccatttcaaagaaactaaatggagcttaatgaacagagatagcctcaaaagtggatttgaagtttatgaatgccaggttgctaagaaactggtgcatggcaacagaggatataaaaataagctttatgagaacacttggtccttcttcagtcatagaaggactagttaaactatgaccttacagagttgtcaaagagaaagccagaggaaaattcatcaactaagacgtagaatatttaccaatttgttttaatttctcctaagaattggatcatttctgacatgaaatttcattaaatatttggctattgagcgtgatagaattatttctacaatgtttatactatattaactttctttttagtattagttttaaaaattgatgtttatgtacattttcatccagatgcatgcattttcagacatagtttcttttgctgctgttttattttattctttcttctcctactctttactgtaatgcatggtatattatcatatgcataaaactcattggtatctcttttatgtatagaaaataaacaggatatgctactctgatatatagacaatgaaatggaaggcaacatgtatattttatgcttcagctagcaatagaaatgtgttatcaccaaagctcatactgtacttaatatatctgagtttttcttttattctctgtccttatcttcaataagggtattctttgagttttgcatagttaattatacaagggggaaccctataaattttataatctcttataatttaaaatgtaatttgcattcagaactgtgggagaaaagtcccaagatatatttgtagtttacagcatagtataatgtctgcctcttaagatttatttttatcttatggattgtgggactatatttaatgccctcctatcacaatagtactcaagaaaagatataagaaggtattataaaagtgtagaagaatcataatgattagacaagagaagattatgcaggtgctttataaaatgtgtatttggaattaatttttattaacaattcctccaaatccacttaactactcttctttgcaaaagcagagacttaggtggtaatggtgtcagagaaactacaggatcagaaactgcaggaagatgtcaagtaaagaatgtcaaagtacaggacaggctatcatgatatttgtttgttcctctgtccttctgaacatcagtcccaaattcaaagacagctggatgttttgcagaataatccaatccctatttcatgtttatttttatttttaacaacatcgtaaatactttctttcgtatatttgaatttcaataaactctaaaaacaaattgagatagtatgatatgaaccaggcaatcttcaatgagcagagtgatctggtcagttgacttccttcagtgaaatttattttatattctacagtttaagttttattcttttctcactcaatgctatcacacaactctccgatataatgtaggtataaagaaagtttaagtaatatataggaggtttgatttgtaattttcttctgcagtcacaatgctatacataaaattaaaaacattcacacctatgtccacatgaaaaataaaatcatataaaagtgaaccacttgtgggtttaaggacataactcagtggtaaagtagctgaggaacatgtgtgatgttgagagtttagcatctgtttgaggcttctctttattgtacatttaaatagctcagcaatttcccagtacttgcagataatggtgtgcactcactcatatactaacttcagttttctctagaagttatgcccaatgctatttcacatttttatttttttcttttcttttttttctaaatttttttctcagattttttttatttgaattagaaacaagattgttttacatgacaatcccagttcccttctccctcccatcctcccactattggtgacgcacacctttagctatttcacttttaacacaataatatctgttatgtcagtaacataattactctttaggagttaggatatgaatgaaagagtaaaagtgaatatttgtatgaaatttatggtctgctgtcatgtacacaaacacagacacattaacacatttatgaacaggattatttatccattagtatttcaaacttagaaaacatactttacgatccagtggtggtggataacctgtgcagaccagagacgacttcataaagagcatgaagttttgttggttttactttcatttgttacagtggctgctctttgcactactagccctgactactaaagctgtagctgctactgctggctaactttctctatttgcttgtgtcccttccaaactcccctgaccccaaaataaaaacacacactcagttcatccctgctacttccggtcattcttgtcaatcaggtgcaaaccccacctctctgagctaaaattgactttatttaattaatgcaaactcaacccatatttccataataacaaatgcagcacaaacaaaagttaacacatctttgcctggctaaacaaatattccacaatgtatatttgaattaaaacctgttctttagtaaggattttccattttgaagtagagggcagacccttaaagaggtgaaaataaaagataagtataaagacttggtacttcagaatcagtgagaaaaggcaaagtgtcatagtactgtccagaacatcctcccctgtaataggagtaacttacttatttttaaatcagcatgcaatgagatcagtgtagctcacctccaggaagtgtttggaaataggctcctcaacatcatttagcataacaaagaagtggagtaaaagcatagttagggcaccatcaccagtgatccccacaccacccatgctgaatattcatacaaacataactcactcatcaaactacattcagaagagctaaagaaatcaggttaaaaaccatgatagctacacaataaccacaaagatcctcctagtaattaattatgaacatttaatacacatggtcaatatggaaagacaaatggtaaacagggcaaagtgaggcataataaaagacaagagagacactgttacccaatcaagtattgagactaaccacaaagtagtgtgatgatgactgctggagtagtcaaactgcagtggcagggtgtatcagcagtcactaccagaaatttgtgcattaacttatttttatcggttataggagatcataattcacagtgactaagctaggcagtttcatgtgtggtatggagaatgggtaagaaaagagaattctttcctcattgggattattccttgctatctcaaatcatacttctagaggaagattattttgtttgaagatccataagagaaaaaaagactgttaatagtctccatgaagttatgctgacgttggggatccaaaattcagctgctaaatggggtactcagtttaccctctgggagccagtacacatcagaaaaaaaacaaacataaatagaaaaagatagcattttaatttgaaaaaaaaaaaaaaaaacaaaaccttgatgctagagaggctgctcagagggtaaaagcacttgccattccagtagaggacctgggtttgttcccagaacccatatggctaatggactggttatctgtttcacaactaactctgacactgtggtttcagaggatccagtgcccacttctgacctctataggcactaggcgtgcacatggtgtacatgcatgcatgcatataaaatttatattgtttcattccgtgtttgtaatttcattgtgacatttcggcaacatttggtgacaagtctgaagactttcaagcaaattcatataagtatttccatttgttcgcaccagagaagcatgttaaataattgggaatgttatcaagctgaggaaaccgagtctgagaatttacctgacagcatgacagtcttacagttgataagaaaaactaaagtaatgaaatttactgttgttctctgtcaagtgtgtttgcataatacttcagtttcataagtgttttctaataaagcatgcaacaggtttttgacacaactcatttctgtgtcccacattcagtctgtcacactttgaccagacctacattacagctacatgcacagtattagtttactttgatatctttctcctcatgattaagtattattttcccctggaattgaaacactttgcagatattatccaattaaagctcatagattttgctctgaggtagatatgtagtaacggttaatcatatgcctttctaaatttatatctccacagagagctttaaagagcttagacaaactgatagtttataattatctttcttaggttttagggagcacattctcatacactggggcagcctccattaaatctgtataaaagcaatagaaagaaaatgctttgaaaatggcataacaatttaaaaatatgagcttcagttcatactgtgagaactaattggtagagaggacttcagtttattgcttgatattagagcagatttgggccatttgcatgatattttctgtttaattttaatgaaaatatagaaacattcatacaactcacactgaatacattccaatttattaggaaatttggtacctaaggaaatttcaaattgtaatacatttattccccataatttgaaagaatttacatttgtaaattttatactttcatatgcatcttaggacctcatagccagttacttaacagcaggtgtaacaatgtttcaattttttcctttgagaatattgtgcaatgtttttttttcaatcacattctttcttttttcccccaccctcttgccatccaatttctatggtttttctctttttcaaactaactaaactgatgaataaacaaacaacatggagtgcaatttgtgttggacaactcctgacatggatcatgtcctgggatgtaactgatagacccagtgttgctgtgtggagaaaactgagtctcctgctcccagcagttagttatccaacaccaataacaaggaggggaaaatggaacaacaagcactttaaaacatataaatttcagttcatgatcttcactgtagcagtacatctttggtttgattgtcattttttatccatgcttccaaccctaattttggatttataaactagatcgttcttctaacccaagctctatttcctgttgtctgtgaaactacaattgtggaattggtttctatactagagttggatgtttataacattgtatcttgcatgataacattgcaaaacttaaaaatgaacctacagaaaactattatggtcatgataaatgattcaacatcttcaacaatacagttctatgctataaggaaggtttcagtaagtaaacatatatgtcaggggtagagtgcttacctagcatgccaaggtcatggattcccatccccgaaatgacaaaagcaagaaacaaaagaagaaacaaacaaacagaatatgatagaataaatattcatagctacaaaagcaaaacaaagccaaaagcaaacaagcacacacaaaccacagagccaatggcaacaatctagactgcaaaatggcagtaggtaaattctctatcactacccagaacagagtttgacccctctgctggtgtctggcattgacaatctcttggaacatgatccctgctttaatgatactttgatgacaaatacaaagatacctttgggtttctctacgttagctgtaaattttcacatgtctgagccatctcagcaattgataggattggttgttaataccattgacttttctaaacaagttaataccattgacttttcttgattttattgaaacaaatttttatttcgctggtcagtcaattcaatctttctttgcttaggcagagtatgttagtcatttgctttttcccagggtgatttatatgctgaatgctttattttaaacttcaggagaataaactgttgtagaagtaatcaggtaagtcatagttcacaaatatgtagacaatagatactaggagaatttctgacaaaattaatttattctttatttacaaacaaaaattagaaaagagtgctctcatctctctcatgttcttgtgaggttcttttaatttggtgttctctaaagtgctatttttaattttactttcatttttcttttaattggatgtatgcatatgtttctgtacaagggtatatgcacatgagtgcaagcacatgtgaatagacacacccagtggacagaagagagtgttggatctcctggaagtgaagggttacagacaattctaagccactcaaaatggatgctgggaaccaaactcaggtcctttggaaataaaatacatgtcattaactgttgagtcatccccacagcccccatgataaaatatctgaaatatgtgactccagccacaaatttgggatgtggtgaaataggtcttgacagtgacttgtttacaaaaactatcctttctgaaataaagggctgtgagttcttttactttcatttttgttacagtccttgttaacacagctctcccatgctgtcatctatcactcaaatttacagtttctctaaagctttataaatttgtatcattcaaagataaaaaggtcaaaatctatgcagaacttcataactacatgtgggcttcaaaccccaggggaggaaacaattatgaataaaataatttaactcaccaaattctttcatggcttaggaaaagctccaccctacttcattgcctcatgagttaagtctttaccaatggcaaatactgaattgctgttctgctaagttcctggttctctacgtacttggcctccctctatcacactgacctactccatttgtgcatctcacaagctgcaaccttaccaaaatagtaacttatagggaatgcacagccattggcatgccaaagcaatttgtgctatgatttactcacatgggaaatctgaaagcatcttaaatgattacacaggcatcaaatgttactaccatccatctttttttcccatttcaatctccactctccctcttgtcctatatacaaatcagcatgtctcagaatgtgcctcatgttttgtatagagggttattttgatgtaaaacaaaaataataaagcacaaaactgatgatattgtttatatgagcaatggcacaaatattttaaaagaatagtgaagggagatcttttgaccagtgaactgtatctggtttcagaggtctaaaatattgatggtatgctttttctttaacaggagtgttgagttctctctctctcctggagctttgtgaaaacttgggccatgtttaatacatcttctgatgattgttctcgagactatatattataggatattaaaggcaatcctgtaacgtccatgtcacagactgagagccataaagttatacatgaatcagtaatgtctccaaatgtgtttccccttcaagcgattctcctaaggactttagtccatcagtgaagtaaataaaattaaaaaaataaagaaaaatattttccaaagaatatttttattacggctaagtacaggaagagtgtcagactagaaacgcagttaggggcactggatgctttcacaatagcccagattcaatatccaatagctacaaataagctcagaactgtttatgcaaatccagaagacccagcatccttgccctccgctgccttcttgggacactgtacacatgtggtgtacagatatacatgcagacaaattaccaaataaacaatatttaaggcctggcaggggtgttgcacacctttaattccagcacttggtgggaagattctgatagctctatgagttctgagtttgaagccagcattgtctaaaaaatgagtttcaggacagccagggctacacagaaaatcttgtcatgaaaactgaaaaataagccgggcattggtggcgtaagccttcaaccccagcactcaggaggcagaggcaggtagagaccagcctggtctacaagagctagttccaggacagcctccaaagccacagagaaaccctgtctcaaaaaaccaaaaaaaaaaaaaaaagaaagaaagaaaagaaaagtaaaaaagaaaactgaaaaataggtaaataaatatttaaaagagagatataatcccaacaaattcctagatgaaaatcagtaatttcaaaactgtatgattataaaattgtgaaactattaaaagcattcaaaggattgcaaagtatgtttttttttttttggtaaaatatgaagtaaatataatgttgggaagcattcgacgactaaatttccccatttgtattgatcattttccttacaacccttccatttataagagtgaatttcttgatatgacagtttcatttaaatgaagtgtatggctgttttaacttttaaatctctagaaataacttctcgaatgaattccaggcatgttactaaaaagactcagatgtgaatttctaactctataggtatcccaattttatttagtgaatgttattccttttctaagatatcaagatatagcatttattttacagccacccacaactgttcaaaggtacagaggaaaatagactggcaatgttgagctctaaatgggactttgatcacagttcctctacgaaggctcaaagaccactgcaacatagggagcaaacagactgtaagggtttgcagtgtcaaatgactatatggaaacagtgtatctcgaacacagcaagacagttgaacacaagaactcataggggctagggtagcatgaacaagacctacataatctcaagccagacaaaaatccaaggacaaaaatggaagtgttcattatttacttccaaaatcaagtagaaagctttcttctagtcttgacatactcttgaccttgtagattttggggttttatatttctatgtcattgtgacaacattgaatttctgctgtacttgtatgaggaagtcctaatacatgcaccatggtgagcaatttatttcttgttgcaaccttgatattttcatcagaataataagctaataacaaacttccctttgtgttttattagtatttaatgtggtagtatatgcaatatgttagtcacagggtctgtagtatgtattagttctagatagtctcaaatttatttcatgctgtgaaatatacataattgggttttttatatactccaaaatttaatgaattgtaagatcctccataatcttatcttttatttagtattttgattttcattattcctgtgtgtactatgtataacattctacaatttttactaaatttctttatggtgtttcatagtgagaacattacatgaagaaaatgatgtgtttgtgtggtaagttctctcacatctgatagtgtcactattttaatcaatacaatattaattcagcagaggaaatacatttgatcccactgattctaagacattttaataagagcaatactttatcccttctggctgatcttaactacatattagcagtgatttgtgtgcatgttgactgaaaatgagatacattttgatacctcactgagaaatcaacctgtattcatttatctgatgatgtgtattacattcctaattaacacttctagaagcaagttggttttacgtaagtctcagatgaataaagctgattaggtgacagatgccttcaagggtttatcttggtggaaatgcatttggttagctctccctggtaagtaacatcaataagcaagcacactttcaaagtactaatttattaagattacattttttccttgggtaacaattttttaaataactgctttgattaaactccttttacttgcagtgttagcagagtgtcgtcatgtatttgactctagtaataacaatgataattacaaatttgggaccacattatcagcttttggagcaacactgattttttaagtcccaatatgagaagaaaaagactttttaaaaatatggccttgggaagataaaatgagaccaaattatacttgctacttgatttcagattatgctcttgcatttgaacttctgttcattttcagaagcaagtgaaagttaggcatatactacaaaaataatgaaaagagtagcaacatatttgttttctgaaacaggtggtacacaggtaactttgtgattgaggaaatctatttttcatgtcttctttctccatctttgaaatagcaaatctaaataatgaagaatctgccattcctgttattaagttcaagtgctgagatgtttcaaaaacacaaaaggccgatgccaagaattggttacctcatttgaggtgttgaccaagaaatttgcattcactgtagctggtttttgttctttggggtcctgccacccagctcccaaataaatacatggagacttattctttcttatgaatgactagccttacctaggcttatttccagtgagattttctgaaattattccatataccttttctctctgagtttttatctttctctgttctatatatacctttctttacttcttactctgtgccttgctgtatagatagatggctagtccctaatgtactactttccttcttttttctcactccatctttctactcctcttcctatttattctctctgtatgccagtaccacctatcctttctcctgcctaggtatttaccattcaactctttgttagaccattcagatgttttactcagggaaagtaacacagcttcacaaagttaaacaaatgcaacataaaagaatacaacacatttttgcatcattaagcaaatgttctacagcataaacaaatgtaacatatcttcaactaatattccacaacaatagaacccaaaatgttaagataactgtgatttctcttagttattttcttgaacttgatgacaaaacctcatacctcagccatagaacatagagaatcaagttgatactaaccagaaaccatcatccttggggtaaggtttgtagtttcatacaggccactggaagagtaaaggaacaatcatttttacttatttatgatccttgagattgataataatcaccaacctggaatgatatacccaccagtgcaagggacacaacatcattgaagtatccaactactttctggttgaatttatggtcttacccaaaagaagatttattaaatctctaagatttaataaaacaaagcttaaaatattacttggtcttcagagaaaaaaattatacatatgggctttattcaagatttatgtgatttaagtaaaacaagataaattaatgaataacagtaaaataaccctattttagatatgagatatatacttatacttctatatacatatacacaggtgtgtatagaggtaagaagaagatggggtctgagggctgtgttaagagatcacagaagacaatatttctatcatccaaatcaaatttacagaagacagtgatcaagactggtttacaaattgatgtgggagggttcgactcactgtgaagagtatcattgtaaaagaaagcaagttgagtgagccatggaaagcaattcaatatgaggcattctttcatgtcctctgtttcagttcctttcaacagattcatcccttgagttcaagccatggctaccctaaacattgaattgtgacttctaagccaaataaaatattttcctcacctgttgctttgtatcattgtttttgtttttatcacaacagagaatgaaattaaggcagaggtcatatttaaatatattgaaattccagatagttcaggccaaactcacactccataatgctactcttaatattatttcattctttgctattgaaagagttatttattttttattagttattattattttattagttcaaattaggaacaagcttgtttcacgtatcaatcccttctccatctccctccccttattcatacacctcctcccctacacccacctaccacccaccccatccaccctccattccccaggcagagtagggccctcaacaggggctccccaaagtccaccacatcatcctgggccaggtctaggcccttctccatttgtccaggccaagagtgcatccctttacgtgagatgggctctcaaagtcccttcttacaccagggaaaaatagtaatctattaccagggccctcttagagtgtagaggcctcctcattgacatccatgttcaggggtttggatcagtcctgtactggcctccagacagcattctggggtcgatgtgcttgcccttgttcaggccagctgtttctgtgggtttcaccatcctggtatcgacccctttgatcctcattcctctctctctgcaactgggatccagagttcagttcagtgtatatctgtgggtgtctgcctctgctttcatcagccacaggatgagggctctaggatggcatataaagtagtaatcagtctcattataagggaaggacatttagggtatcctaaatggtcttctccagtatgcctagattgtcatttcctatcatcctatgttttaagcatagattgtcattggtgtttttgattttagccattctggccagtgtaagatggtaactcagagttgttttgagttgcatttctctgatggccaaggattttgagaactttcttaagtgtctttcagccatttcagattcctctgttgagaattctctattttgttctgtaccccactttttaatttcattgattagaatcaatcaatgaaatttggtggctagcttcttgagttcattgtatattttggaaatcagccctctgtcagatgtggcattggtgaatatcttttaccattctgtgggctgtcgtttttatcttactgactgtgtcctttgccttacagaaacttctgagtttcagaggtcccatttattaattgtagatcacaatgtctgtgctactggtgtaatattcaggaagtggtctcctgtaccaattcgttcaagggtatctcctactttctcctcaagaaaattaagtgtggctggatttattttgagagctttgatccttttgtgcattgtgacaaatatggatctatctgcaattgtctgcatgtctgaatccagttgtgctggcaccatttgttgaagatgtttttgttttttttccattgtatacattcagcttttttgtcaaaaatcaggtgttcatacatgtgtgggttagtatcagggttttcaatttgattccattggtctatatgtctatttttgtgccaataccaagctaaaatagagctggaagtcagggatggtgatgcctccagaagatcctttattatgcagagttgttttggccatcctgggttttttgttttttcatatagtgttgagaattgttctttcaagatctgtgaagaactgtgttgggattttgatggggattgcattgaatcttcagattgcttttggcaagattgccatttttactatgttgattctacctatctctccatttacattgatgttgtctacaggattgtagtaaattgcccttattatgtatatatccattgtggcccccatatccccagaacttttatcattaaggtgcattagatgttgccaaagcctttttctgattttaatgagatgaacttgtgttttttgtttttcagtctgtgaatatgctggattgtatttatagatttacatttttgaaccatccctgcatctctgaggtacagcctactttattgtagtggatgatgttttgatatgtttttggattcagtttgcagatgttttactgagaagttttcatctgtttaaaagggaaactggactgtgtaatattctttctttgttgaatctttatatgatttagatatcaagataatttaaaaagaactaggcaatattctttctgtttctaatttgtgaataacttgagcagtatcatagttaaatcttcattgaaaatctgatagaattctacactataaccatctgtccctgaattctttttagttggaagaattttaataactgcttcagtttcactagaggctataggtctgtttaggttgctcatgtgatcttgatttgatttttgtagatgttatccatttcttttaggttttccattttggtggggtacaggtttttaagtatatttttatgagtctctgggtttcctcagtgtctgctgtcatgtcaccattttcttttctaattttgtgaatttgaatattctctctctgcctttagttaatttggctaaaggtttgtcaatcttaatgattttcttagggaaacaactatgattcattgattattattatttatttatgtttgtttctattttgttgatttcagctctgagtttgattatttcttaccatctattcctttgggtattattttttgttctagggccttcaggtatggtgataagttactatcatgagatctctccaattatttaatgtaggcacataattatatgaactcttttcttagaactgccttcattatatcccatatgtttaggtataccatgtttttcatttcattcagtgtgaacattgttttttattttattctttcttaattactgttttggccaacttttcattcagtaataagttcagtttccatgagcttataaagtctctattgtttctattattgttatctagctttaatctttggtaacagagaggatacatggtgtgatttcaaatattttgccttttgagacttgctttgtgtcctagtatgtggtcaatttggtgaatgttccatcagctactaagaagatttattcatttgtatttatattgaatgttctgtaaatgtatgttagttgcatttgatttatgacataatttagaacctgcatttttctgtttaatttttgtccattggtaagaatgtatggaagtctgccatgaacactgtgtgaggatcagtctgatattttagctgtagtagtgtttcttttatgaactttggtacttctggttttgtgcataactatttggaattgaaatatactcttgatggatttattttcatttttattagcaaatttttattttagaaacaatcttattttacatatcaatcccccatgtcctcaccctcccatccttccatgccctacaccaatcccccaacacagttcccacccatttcccaaggatagtgaggccttccatcatcaaagtctgtcacatcatttgggggaggacatagaccctcttccatatatctgggctgaaaagagtctatttcttctttcatctcttgaacagttttaatcatttcattccagtgtttatgttttcacagactttagcaagggatttatatatatcctctttaaaaatcttaaacatattaataataactattttgaagttcttatcttgttctactgctacattccatttctcaggctccactatagtaagtttgctgaattttggcagaggtatattgtcttgggtactaattattgtgtttttgagctggtttctaggcatctgggtttgtaatttttggtagcaataagtggtcctgtgtttgttgggtatgtgttccattccttgatttctgttaccctttctgggtcttagaaatatatggtggctgtaggtggccgggtagggagtgattctgaatccctgcccagtgtggccactggagagtcccaggtagaacatgttgggtgctgacaggaaggaatggggatgggctagaatggggattggctgagagagtccacaagaatgataggtctgctacaaggtttgattgagtctctggcgatttgaggcagagagtacaatgctttcaaagtagtttgttgcaggacttgggattggaagaacaatttgaaagtcaggaagaatggttgaagatcaactacccgataaaggatggtgtgtttcctgggttgggtccactgtgatgttcatcatacatccccagggaatcagatttcatttttaaattactttctaattagtgtatatatcccaggtgtgtttgcatatatatgtattgtatgtgcccaaagaagccagagaccttgaattgcactgaaccttgaattatagaaagatgtgagcctcccaactggagttcaaggaaccaaatccagttccgctggaagtgttcataaccattaagtcatttatcaagtactcagcaatacttcctgaagtcacaaaatgtgctcactgaaattgttgactgttttcaatgtgtattcatttctgagtacaaatttctttttcatacttgtatttcccttgtttatgtattttagacattaacatttattaatgtgcacttttctagattacatgtgaattcagaagttccatgatgagcacagattcacccttttgttcatttatgtatcaaagagataactgtttgacaaattctgttccacattaagagaaaaactcacaactatggagggaaaatatttctttttaaacgattaaaaagaaatcaaaggattgttattagtcatgatgatacacagtcatttccagaggacatggaaatgaacacccaaagttggccctggattgttatgctaggtttacaacctggcttcattccttaatactacaaagactctaagcctctgtggggtggttaccaaccctgtcctagacactttctggtggatttgatgaatttacatacctggaacacctacacctaattactttatttccaacacagtgaattgattattactcattggttttatttgaagaacaaaatcccaacagtttgagcatagagttcttgttaccttgctactttttcttattaagtagaatctacttgttatccgtcacacttaatgtgtattagtcttaaaaagaaacaataagttgaaaggtaaccatttaaacagatgctgatgtctttacttggatctttacatcatgtatatacaagatattttatctctgcacataatctttgtttcatattttatttttgtctttatatagtatactttgtgttctgagagaaaaattaaaagcaataagccagtttcactttatgaaatacgattttaacaataaaatcacaagccaagactctggtagtaaagtgctgagtcttggtttcttacaaagctgattctccagacaatatagtcaggacatcagctttgctatttacctgcttactgaatgtggtaaataatttgaactctatgaggacattgtgagagaggaggttcaagcaggagttcaaagtcatcctgagctacatagttagttagtattaacactggtctatatgacaacctgtaaaacctgtgttttatttttaaactaaataagtaaataaaattctagagataaatattcacttttgtgatcaaatggttttggtaaaagtccctaggaaatttaatcaggatcatatagccaggttaacaaagagagctataactaaatatgtacaaactgttaaaaaataaattaaaatttatcaaaattctagagttaaaaactagagccacctcaatgttagaagaaagcatatgcatgtatcatcatgcattagcaccaaacaatgcttactcagaattattttgaagcataaataatagcttcaggaaaactctacatacagctatggcttgatcatgctagtccaatatcaccagcccctcttaattttgaaacagcatctaaattgtcagagaaacttcaatattgtgaacccgctgcctcagccttcaaagtatcaaggattagacacgtaaaactattagtttaaaaatcaaatattattttgcagctcaagattttatttgcttgatttaatgaaaataccaagtgacagttttgttatagtatttccaatatactttgtttttgacaatgatccacctccctcactcctccccatgtcctgtgctacttgaacctttccatctgcattagccccttttatatttccatgtgacatatgttccactacagtttctctatttctttctaaagtctctttttcctttgcatggttttgtttctcatgtcataacatatccacactcacaatcacatgcatataaataaacaagctaggatttgaatatgagcttggacatgtggtatttatctttttgagcctaaatttcttcacttaatatataaattcccacacccattcattttccttcacttttgtgttttttcttagctcaatgcaatttcatgtgtgtatgtatcatattcatttctgtagaaatgctggccttgaattcacagagatatacctgtctctgcctcctgagtgctgggattaaaggcatgagccacccagccatcttcatttcattataaattttgtctaatttttctttagtcattttttgtcttactcatcttttgcttatacagtatggctttcaaatatctttgcataaggtttgtgcatgtgttatgttttttttcttttctaattttttttttattttttgttatcctgtttgtcttctagagagagatttaaaaaaaaggtatggagtttggtgagtgggaaggtggagaagatctgggtggagttaatggaagtgaaactatgatcagtctatattgtataaaattcatttcaattaaaactatatttttaaaatgtgtatggcatatcctgctcttctcaacctctctcctgactcaagacatgcctatgggttgttggatactgtctatctcaactctacctcctaagcttttaagtgaaactcttggttttggatgtggggaggggagatggggaagagatgactcttctgttaaatggttcaggggactactgatgaccttgctccctggttaacactgactggctcattgtcccagggcagcagacacaaaccatgtcactgactcaaaacctaagatggtttttcagacttctttcagggtgctgtgcattactaagtttcattcaacaccatctgagtaaaactaagatactggcagtgagtgtaataccttattagatgaggcagtgataactccattcttttcacatttgaatcataaaggacacctggaagcaaatattctccaaaatgtctttatgtgtgtatgcaccaatagcaacacaagcaatgatgttatgtgatgaacagatgagtatttgttatatatgtactacttatagatccattttaatgttaaaatgccaaacaattgatacctcttcatgacttcttcatttagaatcaactaaattttgaaaatcattttttatgttcactgatttttacaggacaaaaactgagagaaatgtagttcaatataagcatactgagacaaacatcatacattttggtcccagttgcagagaaggaggagtgatgaccaaaggggccgatactaggcatgtgaaacccacagaaacagctgacctgaacaagggagagctcttggtccccagactgatagctgggaaacaagcaagggactgatccagaccctctgaatgtgggtgtcagtgaggagatcttagaaatctatggggcaccttatagtagatcagtacttatcactggcataggaacgtgctttgggagcccatcccttataggaggatactccgtgagcctttacacacgggatgggcctaggccctatctcaaagggtatgacagattcagaagacccctatggaaggcctcactttctctggggagcagaaagcgtataggataggcaaggtgttatttgggggtctggggaggaggggagagagagaactgggattgacaagtaaaacaatcttgtttctaattcaaataaaaaatggaggaaaataataaataaataaataaataaataaataaatttcttattttctttggagggaagcaaatagagttttaaaatgtttaatttatatatgtctgaaatgcagtatctaaaatttagagctataaatcgttactaaatatgtgttgattcatgagaatgaagttgactatatccagtgtcttatatgattcaaagtatcaggaaaacactcattatattttaaaatatcttaattttaaaaattaaataaaaaattaaaaatttaatattatttcatattttcataaatacccaaaatattttgtttataaatttattcataaatattttataaacattatagtttcataaaaatatattttatattcttgatttaaataataaagaaaaattaattttaataaaaaattataatgattttatgaattttcttattaaagtcaggtatattagaaatattattgtatattttatagtttaaattggataactctcaattaattattacaggctatgactcaaggcttagtcttgtggtcctacctatcttttaaaatgtcagaatgcagtttttctaaagaaactaatgtaacatcatttatttagaaagtgtgatccctaatttgaacagagcataaataactgtgtaattccatatttgtttgctatacagtaaaaaaaaaaagatggaagctaaaaattaactatacttaggagagaacaataaggggactaagtggctgatggacacatggggcactgatggggtacatcttcagatgtaccttctgctgtatgtatgtctgccttctgtacacacacaagtgtcatagaagagaataacgtatctgaaagaagggaacctaacacatttgagagatgtctaaaaacaggtatgtgtggtaaaaataaagacaagagaaaagactactagcttcagatatgcacagtttgtaactaaaagaacacagactggttattttcatattaaaacaaatataagaatgcagaaagctcatgagtagtctcagtaacagaagaaatttccagataagctgcatatctgtcctaagtagattgccatccaaagacatagagctcagcaacttactttagcttgtgaagtcactgagtatccaagcagagatattcctaacccctcagacatgacatctataaattctgaacaacaaaatttcagtagcatagcagataaaaagtgtagttcctttgtatatttacatctgaaaaacaggctggtttaaatgacacaaacaatgtcaaaaaaaggctcttttggaccacggcagtgaccagagtaattaagatcaaatgtattggctaaaatacccagaatgaatataatagctcagctttccagggaagtaaaaatacaattattgaggttgtaatcatgtgcctgttgttcatgaatatttgtatgtgcatatatttaagcacatgttcaatggtatcaggaaaatgatgcctacagaagtgatatatggtaatattgactacgctctgggttaagagtatttataatagttcaatcatcatggcctttgatgactctaaattgtattcacagtagatttagagaattccaagaggcacacagactgtagtacaatgcatgttggactttgccgaagaagtgttaaaatttctgctaatgactatattttgagctttgtaaaacagagaaaggaaaccattctgcttaaggaaggcatttggcctcaatgagcctgaaatacactttcaagataaatttactggagccaaaaagacagcaagatgagtgtcagaacaagactgacattcaatgagtaaggaataaaggcaccaggatatttataggactgaaatatgaattgtatgtgaacaatctccataagaaagaagatataaaatagtgcttcataaatgaatgaagtgggattgaactactacttaagccttatgatgggaacataatttaagggacaagcacattcatgtccgaaagaaagcccagttgcacgcatcttttaaaatgagctatatgacaacactcaaaagctttctgtactgcctatatacagcatgcttaagcattttgcaggatcctgttataatatatagaaagtgcaagtgtaaaattcatctgataaataagatctactgttcaatgctaacaaatttgatagcatagtctcctagctgcttgctcttctttttaataatagatttttgtgtgcttggggatataatggaaaggtcactgcacacccagtagataatcaataagtatcttggtaaaaactttagtgaatgtgcaaatgaattattaaatttcaagttaagtccatgtgtttctattccgtatcacatcttacatccttagaaatatctcaagtgattttttcctcacttacattgatttaattttgatacagtatagaattcacattgataaatagaaccataagcttgtggattttgaaaatctatactctattattttcttctgtacacattgggtctctgtagcagcaaaaagagcagtccttctaatgcagtttatgaaagcttcccacttccatgtgttcctgactaacttcatgtttagaaaaacagtcaccatgccatgaaccacacaggccaagggacacctgtcaaaaaattgccggatgatctttcagtagggaagaccttttaacaccaaccctactacaaatgggctctaaacatgtaggcattagtacatggacatgcctatccactcttatgcacaattctctgaaggacctctgtgcttcagctggctgacagattttcctctacctccctttactgtcttgacttttcctgtgcaaaatagaaacttatgctattccaaacaaataattttcattgctagaataaaataaaaatatattttaatttcacaaatgaataaaattactattagaaataaacaaattaatctctttattttcatgaatccaggacattttgcttaaatcacaaaaaagtttctgttcagactgaattcttaagagtgctgcttagaaggccaattcattgcttcctacattcttttgctttaccttttgagaaggacataaatgaaatacagaaagatggagttgaacaaagagaaaataagagaacaatgcctgattaaaatgtctaaatattatgcctatcatctgaaatcatgtcctcatatttatatttataaagtaatttgttttatacatatgcacatcacttgtttttttttgaggagtttataatagtgcaagcattagcaacccacagtgggcagcatgaacctttcctctttttaagatgagtctcaggtactctctataggataaaaattcagtaagcaatgagtcgaaagtaatattatgtatattgagatctaatcagtgcttaaaatcttgaagaagcatggtctagacttatctttttttaaaaaacacattctctgtgttgggcactggaacatttattttctgctcatgtctagtcagtttctttatttttcttctaacactgcctctttgcctgtggctagccttccatgaagtctcatgtgtagattggtatgcagaattctgtgatagagtgtgaggcatctgatttggttatgcttcctatcgatgttaagggcttctctacataaattgggtcaacccctccagacaatgcaactgcaatgaggatttgtgaattgtctgcatccacactgttctaaggagaggcttagtaatcagatgcaatcttaaggtaaatagaacagaaaactatggacacattaaaataaattatttggtcaggaatctagccaaaatggacaaaccttttgtagcctttctcctaacaggaaatccattttttatttcaatacatagacttgctcactgtagctacaaagtgagaactcattcacagcaaannnnnnnnnnnnnnnnnnnnnnnnnnnnnnnnnnnnnnnnnnnnnnnnnnnnnnnnnnnnnnnnnnnnnnnnnnnnnnnnnnnnnnnnnnnnnnnnntggatgcttctgtactcatcaatccagagggactccaagccagcacaattaaaatcatgtaaagttcatttgaataacgtagaaaattattagtttataaacatatagactgttagatgcatcaaagaatataatgaaaatgcagaaaatgagggtaagagtgaattgaaaaatcatatcaagacaacaacaatttatattcaggaccacaagggattaaatttaatttttgtggcacttatgggaatggtctctttatgaggagacaaaattgtatccccttaataaatgaaattctcctagtagtgagaaagtcaaccccattaacactgcaatctttccagagtgaccagtttaaagctaatataaaatcattttattgatagaatttttaacttctatgatggctgttactccattcaaaatatcttttaggttctgagctaattattgaatcatcatacatattaaaatggtagtgctgttaaagatagaggagaaagggcatgtgaaaaaatgagaggaggagagaagtcaaagatgaggcaaaggaatgttagagttggagtggtagattggatattaagattcatctcatatcctttcagtctttgattcatggaaaacatgtgagcctcatgattcagatgaaacaaattgtgttaggtcattcagagtatgcaaaggggataggcagcatgttccttcttgtaaattttccaaggaggatttataaaaacatttaattttagtgtacttagctaattatacatgataaaagtaatgtaagggagaatttggtttttaaagactttgttctattttatgcacatggatattttgcatacatcatgtttatgaaccacagttatgcctgctgtccacagaggctattagtggatgttagaactgttggaaatgaagttgcagatatttgtgagctatcatatgggtgctgagaacccaaatattggtgctctggagaagccagagctcttaaccactgagccatataccaccctctaagaaagattcacttgcctcatagtttatgacaggatgcagtttatcacagtaggaaggcatggcagagggaacaccaggtagctgttcctattgagtccacatcaagaagcagagagtgatgaatgttgctgcttacattattttttttattctcggagcatatagaactcttaggatgatgctacccacagttctcctcagttaaacctctctgaaaacattaaatacaactagaaacatacctctttggaaattcaaatccagtcatgtcaacaatatatattaataattatcagagtattatagtggaaaattttacgaaagatttttatgtaaattaaagaatagctggtatcagttttagaaataaaaaaaaaaaaactcaatgaacattgagaaagattcttcaagactggttctaacgttctctggatctataactgagagaatgtctgtatgtatgtatatgtgtgtaaatgtgtgcatttgtaaattaagtgggtagagaaagagaagacagcagacagaaacagagacaaaggaaatttattttatacaacttgctcatggcatgaatgtggatcagactgatgcattgaaaatcctcatattgcatgagcaactagaaacccaaatttagtacaaaagctagatactagcaactttctctttatttgggaaaattcatttttacattgtagatgttaatgggacttatttaaaatacactgattaaagaaacctaaacaactcttcatagtactctccagacaagcatttgactgtaactcagtactgtggctactacacatgttgaatcataaagttaaccatcaaagatagagataagacaaaaggattaaactccaggtatagaaacggtgatcgtaaaagtaaaaagatggattctagattctgtactcctttacccatagatgggagtgtactgataaaaaaaaaatacctgttgctccaggggatgaaaactctttaagattaaaaaagactcctaaaaggcaaatgagataaagttcacaagaacatctgagattacctgggagggaagttgaaagtcactctgctgcagctattttaaaactttcctcttccaaggggagtttctaagccctcctagaacccatgtcttggtcagggatgcctactcctggtaatctaagcatcatcttaatgaataccagtccacttgggatgccttctgggttgagtttccatccagggacagttgcacctcactgttcattcctcctgcatctttatgagctgcaatccctacctccttacacttgtatactctatagtctcctcctttaaaatgtcttctagttacagtccctagtgtctgaaatcggaagaaaagattttcatagctttgttctccctaattgttgcatattactggggttccttttctcttgttccactttcaggatgcctttgtctcaataactaggggatgctcttatttcaaacataattccatcaaccttcttccctgtatccttacttctttttgctcttgaattctccaatatagctacatgatacattaattgtatcttcatgatagcattaattcttgaaaccttatttagtttttactgcagtatggcttagcctcaatagaaacttgaaatccagtctcagtggccaaaacagaacacatttgatttccaaatgctcacagattttggaaacttctacttccacacataaaaataatctaaaaatcacacctttctaagctttcttagctgtccaatctcatccctttagctaatcatattgttcagtcttacagagattcaaatattatttgggtatgaataataacacaattttgtcacttgctattttactttattacaaagctagaggaaggatttggcctacctgctctagacctaaatgtgtttgtttaaatttttctctaaagtttttgtcctaggtcagtctggtcacctgactaacagggaaaaataaagcaacataagtaaatgcactgtattcttgaaaacatctaagacataaaacatttctaatagaggttacaaatgatatatgtaaccacagatgtttaactctgaataatccctacccacttttccttgattttgttactaactttaaactttttgttgaaatgtaaactttctttctcagtatttttaagttcattgggatatgtttaaagtaatgtaagatctgaaaataacagcaaagaaaggttaacttaaaacttgcaactgaagtcatataaaaaactgtggtatcttataagagtatattataaaagatttaataataatggtctgagtctctgtaaaatgtatttatggtttaaaatttattttgatgctgaatgaatttcaattcaaaattatagattttcagacacaaagttaacagtgatggaattataaaatcttataaaagttaataacttattttaaaccattaaagatgtaagttaatgggcagtcaccatataaatgatcgaattctttaacgtactttgaaacatgtttacagttatactaagtaaaaatataatttatgcacaaggacaagctttggcatttttgtattgtctcaaagttaagcctgataaaatttactaaatatagtattcaaacctgggcactagataatgccgatcaagcctttcagacatctgctgaatatgcattgaaggtgtttaacagaaggaaaggacaggaaaaggcttcctatgataggcagaaataccatcttcaggaaataggcctgagtccacctccaaacagtcctaaagatttcaaatatacacccaagagaaaactctccctaagtaatttaactttgcctctgtccacaatctctgtctcatcagatttccaccaggctggcagacactgtcctagaaccacctttaccctgcagatactctgaaacctgctcacctccatagcctgggctatcctcaaaaccaaagggcctttgaactgatgactgaccaaagtgaggcacttatttcttcccagtaaaactgtatttactacataaccattctggtcaggtaaaagagcagattaacaaccaacaatcaacagctggtgcacagaatctgccccacccccaatataggactctctttatggtgtcctgggggcttgtgacttatgcctctgatctctagtttcctcataataaatattgttctctgtgtcttcagtttttttttttccaaagagaattaacaatgagctgacacaatgctcagggaaccagatgctaattatggcactccttctggtatcctaccattacaatttgaccacctactttggagcaacattccagactaccctttttcccaacatccccactcaactgaaagtagccagtggacaacctttggctattattatcaacaaaaggccaaaattgtggatcattagccagtccctgaaaggctatgtttctagacatattttggggtatcagctccactgcacttgaactaggttttgcaaggaaatggaaacatacagcatttctcagatgctcttaaattagtggttctcaaccttcctaatgctgcaaacctttaattcagttcctcatgttgtggtgagctacaataataaaattattttgctgctacttcataactgtaactttgctactattataaatcataattacatatctgatgtgcaacccccaaatgggccatgactcacactggttgagaagaaatgcctgaaaggctgaggaaacgctgctaaccgaaaataagtgcctcttctgaacaattccccacattaaccatctggcttttccagcatgtgaattgtctccccactcccattttcacccatgtaaaacccagagatctttccagctgggagctgtcctccactgcccaaagcagtcagatagtttgttaattttcatttcactgttctctccactgagtggctgtgttcatagtttcttgctaccttacttaaagtgttgttcccaaaccttactcaatactgaaaagtttgtgttgggggctaggggctgggaagagggctcagtcgttaacagcacaggctcttctttgagaggacccaggttcaattctcagcacctacaaggcagctcacaactgtctgtaattttgttccagggaatccaacactctcacataggcatatatggaggtaaaattccaatgtacataaaaagagtttgtgtggctcctagacaagcaagtaggcaagaagtcaacttgtcaggacaaagatcccaggatactgtctctctccagaaagaaagggaagaaccctttgtatgaagatgtaagctggtttgtataaaatcttttactttttctttgtctcaaatgcaaatttgtccctcatagggtaggcagaggtgctaatgctgtaggaattctgaggatgaaggtggggaccagcagcaggatcatggttgctgtcctatacacagcagccatgatagctgtctttttcatatagatggtgaagaggaagtagtgacaatggagatgctaccgagatgtcatgggctcctcagcaggctctgtgacaagattttgactttaagtggaatttctagcagagcaaagacaattctgaacatcagatttgctaagtgactacatcagtggtgctcaatctatgggttgtgacacccttggaggtcaaatgatcctttcacctgggttgaaaatcagatatcctacatatcagatatctacattacaattcataatagtggcaaagttatagctatgaaacagcaacataaataattttatgattggggtccctgcaccatgagggactatattataaagtatcatagcagtaggaaggttggaaccactcagctacttgaagcaagcacttgttacttgagtgatgaaatggcagtacttgcaccttatctccatgtcttaagtgatagaagaacatatctgagtgtctccaacccatcctaatcattaatcaggatcctgctttgggggtcagctttgataataggttaactgcaccatgggaacagtgaacaatcttgcaatctccaatagggttattttcaatcattgcacattcaaatgtgtgttagagtctgtgtgtcaaacaacaattttgttatttgtgttttgttctctctctctctctctctctctctctctctctctctctcgttggactccacacaaatggtaagcagttactttataagagatatattttggtcacttacttccccatctgaaatcagccctactcgctccatctgggtctcttattgctgagaaacactgtgactcccagctgcccacagctcaagccctgtctaagtcttaataaaagaatggtgttgattcaaatctgtgccctcatgagaatggactttaaggtattattgttttattcacttaggatcttattttttttctatgaggattatgttggttttaaacaatgatctcttcagcaagtgaccaagcacacactatgattctcctccaaaggcatgtggatgtttttcttctgtgttctgctttgcctccaaatacctctgctaggtttctatgaaatattctcatttttgctgctttgcaatgactctaaatacctcatcagagttaggagttcttgcttgtgggcaatgctatttcattattgatgtgctatttcattagtctgtgctatgtgaactctattatattctttctacattgttgataatttcttgtgttatgtcaaatgaaatttgaggtgatggaccttaggggatgggcagctgatttatctcctttaatgctagaaaaatctaaaatcatgcttaaaaaccaacatacacatagtgatattttatgtaagcttttctttgactttagcaatatgagcaattttagcaccattttaaccacttggagttttaatattttctttgttttactaaatgtgtgatttataggtttgtttttggttgtatgcttatttttatttttaagagaaatggaagggcagaaatgtaagttgacacccatttcctattaaaacatataaaggctccagtttgtgggttagctcagacatacagctctgtttagcatggcagacacccggagttatattcctgccactaaacacttcaagcccaacctgaatacactcaaatcacaggaaatggtgaaaatgtgagcagaacccatggctattcagaaaatgctaaatgtctgaataatgtactaaatggttacagaagaataatttctgataatctgcaagcaagtaaggaagaatttttcccacttgggagtttcaacaatcttaaattaataaagcctaaaagtattttaagaatttattcaatatggcagatttttccctaaataaagaacccttacatcaataattgtcaggaaatgcctcaaaatgcccacaattctgtgaattttaacacaataaatcaagtcaaatctgattctgatctgttttgtttttttttttttgagacatggtctcacgtatcacaacctacctgtgcttactatgtagcccaaatgcaaccttcctgcctctgctcctgagtttggtattaatggtgttcactcctgtacctgggatgcaactcagggcttcacccatgtgaggcaagtgctttctcactagaactacatcttaagtataaatcaaactaattcttcattgtcaggtaccctaagatgaagcacattgctgaagggaccaccttaaaacaacatgaaacaagtgttctttcttgtcttattacacatcattaaatactggtgtcaagcattccagcaaagttccaggaagtgtattaattaatactgcgacacagattatatcactttatgttactgctcaactgctgccactattaagaatttaaatttatgccaaagacatcataagaactttaaacatcaccatctctcttcagccatacagtgaggtccatctttgagttctttacaggagtcacctgaagctgccatctctttggctcttggctgtgccaggctttgctggtggcacaagcactttgtcgaagtcgatgaagctgataaatggagtgctcatatgtaagcagtaactattaataaaactgctcataatgggggtctgacagcaatgcaaactcctctactgacacacgggaggaaaccaaggacacattcatcattgcctttcattgatcaatacctaagtatcactttatggacaaacactctagcaacagttagtccgagtcagaacatttgctctttcaaacacatgcaatgtgtcacttaaaaaagaaaaggaaatgtgcttagctgtgactgcaggtgcaagaagagactgaggctggagtacagaagcgagagaaaaacatgatttacacagtgtaaaaataactggcccaactattataaaaatgaaaaatacaattacatggtgcacatagtttttttttaatgtaccttggcttatagatcatcactaaaagaaaaattcttaattttaataatgcgttgtatgtccttttcttcatgaatcatgtgtgcttccttcaaaaattcctagtcagtttatgcaaatagcttctcatactatccctaaaacaattgttaagctaagacaaggaatatagtctgttagggttaccatgccttaagacaatactttgactttttaggttttttaatttttattagtacattcattttccacttttattgaaaatagattcttttctcatacaatatatcccattaagagcttctcagaggaggagcaagagtagataatgtggtaaacttgatcaaaatgcattatgcacatgaaaatgtgacaaaaccaaaacaatatatgttaataaataaaaaagtgttttccctcactctagtcttcccacttcctccctgcctccccttccattcaaatccactccgtttctgtccctcagaaaagaacaagtttctaaaaggcaataaaacataacaaaaaaatataataagacaaaacaaaaaccattaccttgaagttcaacatggaaaacaaacagaagaaaaaacagaagaatgaaagaaccctcattgtcttactctggaataccatataatattaatggaaaatcatactctatacccatacaacctgatgcagacccttgcaggccctttgcatgctgttctgtttcgagttcatatgagctttgctttattagttgatttagtgagcattgttttcttggtgtcctccatccctagtggatttccattctttctgtctcgttttccacagggttcccagagccctgaagggagagaattgctgtagacatcccatttagagctgagtgtgccaaggtctcttattctctggatattgtctgttaatctgtatttgttcccatctgctgcaagaggaagcttctctgatgatggctgagttaggtggtaatccttgagtatagcagaatacccttaggagtcattttattaataattttttttgttttttaattttagaccagtagtgcttggttttatcctagctctctggaatatttaatctctatttcttggttagtcaagcagtactgagtatgggttccatctcacagagtaggttgtaagtaaaatcaggcaatagttagttattcccacaagctttctgtgatcattgacctagcatattgcagggaaatgtaggtcaaagatttttgtggatagattggtgtctatgcttttcttttaatagcttgaagagtatcttcctgtaaaacagaacatagggctgaagtttctatatagtcaccacttgactgttccatatgcagtgagtggtaaatgtgttgtcttcagcaatggggctttgctgtcagtttgtgtacaaaaacctataattgtgccaacagcctaggttgtgtgggaatattcataccaccccctttggccaaaaactcaactgaatataaccaagtgttagtaatgaaagctttgtttggtgacaagagatgacagttgagactgttttcctctaagtatttggagacttcattaggattttcttctacattttaggaagttaccactgtactaggttttcattccatcccctccattgcccctcagttctaggtgtttctccctgcatcccttcctcctctcccaattatcctcctatttccatcccccgtcaacaccagtccacctttcaaatttattctatttctgcctcccatggaaatcaatgcatatcttccttgtcctttcctccatacctaacctctctgggtctatgtattgtagtttggttatcattggattaatagctaatatccatgtataagtgaattgataccatctttctctttttgggtctggcatacctcattcaaaatgatttttttctagttatatccatttacctgcaaacttcatgatgttattttctgaacatctgagtgacacttggttgtataaatgtaccacacgtcctttatccattcttctgctgagggacttctagactgtttcaatgtctggctattgttaatggaacagcagtgtacatggttgaccaactgtccttatgataggatggagcatcctttgtgtgtattctcaagagtggcatagctgggtcttgaggtagattgattctcatctctcagcgtaaataccaaactgatttccaaagtggttgtacaagttttcactcttaccagcaatggagtaatgttcaccttgcttcacacacttgctggcatgatctgtcacttttgttattgatcttagctgctatgtcaggtataagatgaaatctcaaagtagttttgatttacatttctctgatagctaaaaatgtacaacatgtctttaagtatttctcagccatttgagtttcctcatttgagaattctgtttagatctgcacaccattttaattgggttattttgggttgtgatatctactttcttgagttctttttatattttacatattagtcctctattggatatggaattcttaaaaatattttcctatttgaaggttatgtgtgaatgagagtgtcctgtgtcattgctttctatgagcatagtgaaaaaccagagtcgctccatggacaaactgccagaaactctagtatcgtgtgagaatttaggagacataagaacaagagaaaataaataatatggggctagcactttcctcttcttgatcctctttaacagtgtaaaatgtggtacatacagatccattcaaggtgcaggctagctagcatttgttgatgcttgaaatgttcaaatacatattcctacatgcttcccattattattaaatgtacgtgaacaaactcagctgcaaaaccctgtaagtcttgattttgcgttgttatgaaaggcctatcaaaaggaaataaagtgtaatcagatcatcaaaatggataagaatatttgtaaaaagttttaaagaatacgaggttagatgaagggaaatcatccatttttatggcttttgatagtttatttgactgaaatttgtttaaatgctcaaacatttgattttgatagcaaacatacatatatagaaaaactcaaataagctctatttttagtacattttctacaagagctgatatatatatatatatatatatatatggaaatttttttgtaaattgaaatgttcatttataaaatgcaggtgatgnnnnnnnnnnnnnnnnnnnnnnnnnnnnnnnnnnnnnnnnnnnnnnnnnnnnnnnnnnnnnnnnnnnnnnnnnnnnnnntgcaggtgatgcagaagtatagaaactctgttttatagaaatctcaaaaatagatgcctgtaattttgactaaacagaaccatttttacacattatctaaactaaaagtgcaagaaaatatttctaaagaataatatatgaaattacttgaaaatgtgtctgtgaatataccatgttaaccctgcatggaactttcatttctaacgtgaaatctaaaaagtaaagaagttaatcaatttcatgacatccaaataagttattgacagacacattgaaagttttattgatttgaaaaccttattaatgttatacccaaaaggatctattctggtaaataaattaaaatgtatttttatcacctttataatataatgaccaattatatgtattcacacagatctatgtgtgttcataaaaactggttgaaaactgagcagtttatctgttggtatgaagaaaagactgaaaataatacagaggtttcatctaatcaggcattttcctgattaactgatagaaaaatgtttgatctctgcaccacagaagatggattatatattgccctttttattattttagttgtaggatacaactacttaaatacttaaaatctttgtgacttacaggatttttcatattgaagagaacagaaattcccataggacctcaccagagaaatggggcattatataaaacctgattcctaccccctgggtataattcaggattctcagattacagcgaaactatgactgtgccaggtgtgattttttacataagctttcccattcctacacaaactggaaggtttttcaagctttccccatgacatcatcctgatttacttctgggtctcagaacagaattgaattcagaataaggtctaaaattctggatgttgtgttagtaatgtgaacttggaccaggatttattcagggaacatctactttattacttgtaaaataataatgaaattgattccatgcatttattaaactaaaataaaaatgagaaataaatctgtatgtgtgttttgagatcaattgatcaaatctaactttagtatattttatttaagtaaggtaagtatcaaaaaacaatttcttggtagattactttgattaggatcctaaaggagcattactaaagatttttaaatgtaatgttttagtattttgatacaatgtgattctttctgcttagtatagatataacagaaacaacagattgactattttgaatcttatgtatcacatgatctaagtagcagtgaattgctcttaggagaaagatcaggtagtcaattgaagctcaggttctacaaaactgtccatggaatactgatcagggatagtccataaagtcttgtcattatttatacagttgagaaaagtataacaaactctaagagaataattagctgttcatatatttttgaacacacatccatggttgtgtatgttcttcaaggtcaattgattaaattaaagaacaaattagagattttttttaattaggtggtggccagcacaggttgttgtattccctgaacctggaagtacatgtgtttgtgagtcagaaatgggtactgtcaacaaaactcaggtcctcttcaagaacattaccaactgtgaactgctcactcatctctctagcttgaaaacagttttgataaggtacaaagtcaggaagtgatttacaaacattgtactaataatacacttcagtgatagagtaagtggtatgaaacatttacaagacagaggggccaaatctggtgtcacaggagaatcttctacccatatctgttgtgttttatgaggtttaattcattgtttctgtggcctgtacttgagtctgcacattctgaactggggcttggtctatattatgtttgacaatttctatagattctgacatggatatatgcatggcaagaggaatatgagtgtttatttctgctgatcctaaatgtctagacatatgtggtgttgtattataaacaacaatgtgtgagatttgatgtggcattttatgaccactgaaattatattttctacacaatttttatgacatatctgttaatatatttgctttattccaatatgttgaagaaagagatttctttttttctatctcatccatatttcatgtcataatgtcatgtaactttaattatggagaaaaaatgcttattttgccctgtttagaaagtgatcataactggaatcacgttagcttctttcatgaaattcttagttaatccccagtgatgagctgttaatactttctgctaccttcaagtgttcaaagcaatgtcttccttgtctttccaggaaggaacctccatacagttatagaacattttaaattcttcaaatacacagcaatattccaaccatctgtctttgcacatgctcttctctgtgataactccctgttaaacatcagtttgcacctcaatacttcactttccaaagttgtggttaacacaatagtttctctacacaagcatctaattatcatattcttcctactgtctgcaaactgcttgaaagaaggactctatcattttcaaatccatttcattacctggtggagtttcacatatgtagcatactttgctaaattgatgacagaaggggagtctcacgtgtactttaaataaaatagattacaacagtcctataaagtgcattacaatatgcatgtcttcaatttcatgtatgtgtgtctgtgtacatgtttgtgcatgtgcagaaacatttcatattaatgtcatgtggaaaccaaagaatagcctcagcactcgggttgtttttaagacactgtatctttgctttatttttatttttaatttgaaatgggactcttactagccttgtaatcaatgggagggctaagctggttgatcaatgagtctaggtatgtgttatccttttgtttaaaaagaagaaaagagaaatgctgagacatgagacatgttgactataagtttattataaggcctggcagagtagggagacaaagaagaggaaaggaacagggataatggctgaccgtcatggctggtcgctgcagaggggcagagtgagggcataggtgagagagagagtagagaggaagcagagagagtaaatgggcagggatctgtctttttaaggggtcctctccacctgcatgcagactttgttcccatggaaccttgggctgaccagggtactgcctgttccaccaggtaacaggggcaggccagcataatgcctgaacctttcattcccacctctacttagattcaacagccttagtatttttctgttgtgttttttttttccttccctagtataaggccagtattccagccttgtccaggacaaggagttgccaagaatgtttggagaaaagggacccgagaaggttggggtgttgccatgtcctggggtggggtagctggttgtttcattgcagtcggggctatgtggaactctctgatgccccttagacctggcaagatgtttgcagagtagaggacaaagttaagtttaaaaaagaatttttcatagatcctggaatttgagggaagattgtaaggtaagggatgggttcccgaggtgtctcaagatgagggaagggaatttgggactggggaaaggttgaatattacctggagtgaatctgacctgtttggatatgattcggctccgtggaacttacaagaatccttagagtttgaggaaacataagtattaaacacattagcagcttgttcatgttagaagcaacttggctgaaagcattatcattttaaaatagacagatttttttttaggacaatgaaaagcatcttaatcttgaccnnnnnnnnnnnnnnnnnnnnnnnnnnnnnnnnnnnnnnnnnnnnnnnnnnnnnnnnnnnnnnnnnnnnnnnnnnnnnnnnnnnnnnnnnnnnnnnnnnnnnnnnnnnnnnnnnnnnnnnnnnnnnnnnnnnnnnnnnnnnnnnnnnnnnnnnnnnnnnnnnnnnnnnnnnnnnnnnnnncactttacattaccatcttagaccttccattttcagaccttcataccttccattctcagaacttgtatttatctatcgtgttagacctttccatctgcagacctttgtaactacattctcagacctttatacatcttacactttcctatcttcacatagataaaccctaaaatacgcgttcctggaatctgttttgctttaagatggcaagactaccagtcgtcaaaagcatcagagttcttgagaaggataagattttacctgaatcaatgattaaagaataacagagacttgccagcaggctgcatggacagccatccccaaggtcctccatccatagaagtgggctgtaagacacctgccttcttgcttgtagcatgtgacctgtgtattacagactatgggaagactcacctaccattggcccaagcaacactgggaaagtcgattccattgtcctcttgtccacggtctgcaatactttgtagcagttgaggtgaagggcagggttgctcagtgaccagcgttgtcactgactcgagatgaagcttcttcagtgcccatcagtattttggaggaaatggggtggggccagcagctggcctatctctctattataaataaatttttaacaaaacatattaaatgccataatctctagatctctgggcatttgagggctgtctgtttagtatctcagcagtgtttagtatctcagcaatccaaagcttgcctttagttagagaaaaatcctctttttgtaataaaaattgtacctttgtaaatggcttacaggatggactgaatggtataaatattttattaatttgaaatagacttttatgattttaaactttcatcatcatttaaatatacacgagttaaatttaagttgtatagacttagcttatagtttaagtatagttaaattagacctttatgactttaaatgtttaccattatttaaagatatatagcaatttagaaatatgagacttcgcacagtttaatttaagtagcatatagagctagataagtataaagttaaattacagagacaagcaggactgaataacagtaaaggggaactagaatgtaatctctgatctgtgcattgtagcaaacagacaggagattttttttttcgagacagaggctttggagcctatcctgccactcgctctggagaccaggctggnnnnnnnnnnnnnnnnnnnnnnnnnnnnnnnnnnnnnnnnnnnnnnnnnaatctctgatccgtacattgtagcaaacagacaggaaatttaaagggagagagtagatctaaacagagggccctggaaaggcacagtatttaggtaaacaagccatgaacaacagagccagtgaaagaagaaatcacagacaaaaaataaaataaaataaaataaaaagcaaaaagatctggcagaaatcaaaaatccgacagactggttcgctggcacaggccgctggagctgggcgtgcctacaggtaggtcacatgaccaaaaaggtggggaccataagccgcttttgtctgtttacctgcttgttggatgaaaccagaaaggttcctctatgcatttgccatggtgaggcaagtggaaaaccattaaaaagctcctctatggatacacgtctgcccgtgggagttaccagggtcctggacccaaggggacacagctgtcctgaaaccaaaaaaggaccagcggtccaaaccaaaaaatcaccattcctggagcgggatcccatgcctgaccttcaggaaatgtacccaacaagtaaaagaagaaataaaaagcaaaatgtctggtggccatggttgcctatgcaagtcattgaattgagtgggcaggcctaagctatgtcacctggttatgaccaagatggcggcccccaggttagcacacgtggttgagatggcgacccctgtaagcacattctcaattgccagaaaagtttcaaacctcattcatgtggaaaaatgaaaaccagcaaacaaacaaaaaactctcagagcatctcaaacagacattgtcaaccaagaagaaacacagtcagagatagaacaaacagaacaaagagggacattcccagatgaaagaaagttcagtgaaatgcagtagtcagtgaaaggcagtactccactcatttacctacttgctggcagtagccaaaagatcccgtaatatgtatttcccgtgggcaaggctaaaaaatggcacagattgctctgtctgagagcacccagcagaaagcccaaaagaggctcagcaatctgaaaccaaaaaatagacccagagtgaactctaaaatgtagtgctgggtccgccccttgggaaaagttatgggtatcttaccggattgcagcgaacaggaagatgagtgagttccagagatccttacttggaaaagcggcaagttgaagtctggtacaggcaggaggaagtgccaggaaaagctgagatggaagtgggttttgagttcagattttaggatccccgaaatttcctgtgcccatggcaggagagaaagcctatcctgccagtaagcttcaagagtttacgaagagagcctaaaccaagtagggcactaaatttgtttttccagcactgggattacagatctatatgaccaggcctatgcttttgtttttgtcatttgtttgtttatatgcattttgggatcaaactcatgtctttctgctttcaaggcaagtcctttcctgctgctgtcaattattggtgaataaattaactaatatgataataaaatttaacagtttccaagtcaagattaacacaattattatgcagttcatgttccttcatctggaaataagtttgcacaaagttgtgtgcttgaaattatcaggaaataagagctgatagcataatttaagggtatgaattctatccctgaacaatccagaacattataggaacattcaccaactgtgtatggttacatacatagggacaataaaatgatattagttgcctctgaaaaaaataaatctctatttttatcaatgatataagtgtaattatattgtctttaataaatatgctacactatctctcatcctcagaatgaaaaggaacaactggtacactatgtgcattgttcagccaagttacccaggcttgtattgtcaagagcaaccacatttctggggtgccaatgaagcaatgactatttttaattaaagtcttcttcttttacactcttttagagtgtaacattaaaatgcaaagaaacactgaagggccttttcttcattccagtaaagtcaacaagtatttattcagctagactttatttattaggagtacttaaacaactataccactccatctgcatgttagtcaaggattcctctgacagctgctccccgaggacagggataatttggtctagaaatagaatgtgacagcattagactcctattaatgcgctaggtggcttttcagaggatagatatctgcaatggccaggtttcatcattctttgctggacaatttgtatcattattatttaaagtttcttttgattgagaacaaagtatttcatcctgttaaactcacttaaagcagcatccaggatatttaagaatatgtctcagagtgctctgttttctgttgttttgacgaagtggctgacagctaatcctgctctcttgatgcttttgttcctgtcttgctgttccctaataaggtcaggattccaaaaaatgtcttagtgttgaagaagacccatcagaattgattgctctgggtgactggtaagccagatactgcctggaagggatccgtgacatgtctgtcagactttgacaggagcattgttttcaataaattcttagtttccatgtagtttgagtgttttcctactactctgattggggggaggtgagtttttcttgccaaataccattgtttgaaaatgtgttttacagaagattattttgaagttgttcaaataataattaataaaatggtgtacctgtatgtgtttgtgaaaacatgcatacataaatattcatatgactggaatgtgtacaggaacatgtgcgcacctgcgaatgcttgactagaggtcaagtaacaccttctccaggtccaaaatttaactcctttgagacagggtctctccttagtctgaagcctgacaaacatgttaggccagtcagtcagggagctttggggtccctcctctctctctctctctctctctctctctctctctctctctcttatctccccagcactgatttacaagagtgcaccaccaaacaagttgtttttgatgccttctggagatcgtgttcatgtccttatgattgcaaagcaagtgcttcacagacatagctgtcccccaatcccataagaatcttgaaatgtgatggatagagtcttccattatgttcagggagaaaggcaagtgggtgagaacaataaactacccctattagaaacttaacccaagccatagttgtgactggacattcagttttctgtagtaattcatttcatatctctcctctctctctgtccccctccctctctcatctatctctatctatttatctatcatctatccatctatatatttatttttactcaggagtttattcttaaccctataatctagaaaacagtacagcagtatataatgtaattctttgcatgttaccttctgtccaaatatcacaattttatttaagtatttgtttatacatattttcctcacaagaaagaaaatttgaggagagaatttcagctctattccacgctagaatcctactaggtatagggagtaggtttatttacacagcaggagtgaggaaacagagcaaaacactgaaacttaagtatggttttctgctgtgcttctccacctgacagagccaccaatctggctgtagccagtttagcatgctctcgttttgatcttctttctactctctataatcagaatctttcatgttctcactatctttccatctacctactgctggtcatcacaaacagtgcacagtggctaagttctgcttctgtgtttgcacatgcattctgcatggggactgatatacattagctgtgattttattttattaagtacatagaaattagcaggtagatatagagatttttaacatcaggcacccacattgcagaaagacagccagagtggtccagttacaataacaaaggtgttgtcaattagatgcttacaacagttatcctatgaaactgggaagatgccaccatgtcaaagctccagattgaagctctccatcaatgggtgagcttctggcttcttgtccccactagaggcactttatatcacaaaagaatagaaatatctaccagctatgacttaacattctagcagattcaacagccttagtatttttctgttgtgttttttttttccttccctagtataaggccagtattccagccttgtccaggacaaggagttgccaagaatgtttggagaaaatacattttcttattctcagtatctgtgcttagctagctaaaacagaatgtgatgatccaatatagtgtacagtacaactagcatgttgaatctgcactaagccactgacaggccaattgctatcttcataattgacaatgctgtagctgaggtctaattatcaactttttcctgtctccagaagagtaaacatgatagagttgtggggatagcctctgggcacctacaagtctgtattcacaaagttgcctgtactggagcttcacttctttcaaactaagtacaactaacagggcctcctgtgtagtcttgataagaatgggaacatcaagtgcccaatgtgtggcaattgcttacacatcttatcttttatctttagcatgataaacaaacagaacaagaacaaaagaacaaacccacagcccatttttctcttagggtccccgctatatttgcactcaatgcttttggagtttcaataccacaggatgccattctgctactagtgcccctcatttaccagcaactctataacgttctctttcattattaacataagttgtatctcgtgctcaactcagtaggaagctgcttttttattccctaaactaattgtcaaatgctcagccccttctcttcacctggaatctgttttttatttatttttatttttttattttttattttattttttttctcaccaactcaagttcataggctatggaggaatattgaatgctttcttctctcctctccattattacatatttttaacttcccagatcactagggcacaattttccctctctttgcaaattctctttcaaatttgtctggctcaggaaagctcacaaaatgcaccatgtctggtgttggtactatatgtactcagttgtttgttgtctatggccaaggttgtgatattcctgcatgcttattccatgttggttaatgactgacttccgcagtccctgtcaaggtcttatacgtgcttccaagcaatgtggtctgaaaacatgcaaaagaaaggctgtgtgaagccacaggagtttccatcaaacctgaggcaatacagccacgagggaaccttccaatttctcctcactctcatccattgtttcagaaagcagcttgagtctactgcagcactacccttttataactgatcttgtcaaaacatccttcacactactcagaaggttccaggattaatgcatgtgagtcaactttttgtaactatgagaaaacacgtaaaataaatttcttaaaggaagaaaagttattttgtatttgttttacactttcaaagtccctatctggcatgcatagtatgccatcatggtggtttgtgtgatggagcaatcttgctcagggacaaggtatatcttttcagggcacacctagaatgaataacttcctccaactagagcccagcttccaaagttgcactaagttcctaaaatttatttaaatttggtatttaccagtagattaatacaatgataaaatcagagacttcatgaaccagccctttcacaaattcctgttctacaaacagctttcagtgggaacctatgatttcaatacatgactcatctgcctcatccccaggatatctgacaagacccttgccttttatgtaaccacatgctctgcacatagatacatatgggtatacccacatgcactgcacatacatacatatggatatatgtagcgatatcttgtttgcacaaataaagcctatctgaaggtcagaaaatggagcttgccagtagctaaccatagaggtctagaggtctgtacagagagacaggaaagtgaggtagctgggtagaaacaggttataagaaggaaaaaaccagaaacttgctctcttgtctgttgagacactaaggaagtaatgtgtgacatggtttgctacttctttctgatctctcagcattttcctctttatctgactccaagtttttattacttagaacaactaagaactccatttacagatatacccacatgattgtgtgtagatacatatggatatatgtaatgaatgattgtaatagactccatggtatcctgaaataaagagaagtcagttattcaatagggtttgactcatgaatgacaaataaggtagatatccaacaatgtctgcccataggtgctagaatctgtgatctgatctgtgagcactacccgaaagagagagagagaatcagaaagagagagagagagagagagagagagagagagagagagagagagcttgcttcccagtcaacaaatagcacctgagaccacactcagaagtgaccagtaccttaaaaactattggatgaatgagttctcacaacagatatacctacatgcactgctaaatgcatatggctatacctacatgaactgcacatagatagatatagatatacccacatgcacagcacatagatacatatgaatagacctacacacattccacatagctacatataggcatccccatatacactgcacataactacatatggtcttacccacatgcactgcagatagatacatatggatttccccacatgctctatgcagagatacatatggatatactcacaaatactgcacatagatacatatggaaatgcccccacacaccgctcactgatacccacatacactgcacatagacaagtatggaaatacttgtcacacatactgcacatggacaaatatggacatacacaaaaataagcaataaatcttttaaaagaataatatcaaatataaaaaggtagatttttctgagagtggtacagagggagaaataccaggagggttgttaatacatacaagatttattgaggtgacgtcagtcagtgtcacaactgccaatacgatccagcaaacagagtggttggtgagaaagataaccttttatgtgaatgttaaacaggggcaaatatagactcacataaaggccaaagcccactggatttgatatctctcatcataaatcagggccccctgtggaaacatgtcccattatatttagaggagaaatccaagggaagaaacaaattcagagttgcacttttgccccagttgttaaaaagcagtttcttatattcaaaagctgagcataaatgttattttcctgacacagtaaaaaatttaaaaatatcacagtatctcaatagcacctacattcatgttctcataactgcacgtatacacaaacatacataagtttaaaaataaaatcttaagaaatactttggtcatttaccactgtgttaaattgttacctacatcatggtaaccacattcattcccttaaaccagatttctatctagttgacctcattttttccacaactacgttcctgtctctggtagagaaacatttgattcagtttgcaattagaattattaaagttcataaatcacagaaacaggtttgtgttgaggatgttgacactttttttgactcctgtggagagagaggacaactctgtgttgtgactcccaggaagtcggaaagtgctgtcttggctgggtgttcagtcagcctagctccctaaattgcagagagctgtatggtaaggaatacttctgcaaaggcagcacttgtgaaggtctagacatgctcaatgtttagattatcgtgctgatcccatgcttacacttataaaacaagcacttgaaatatggcttatactcaattcccaatcctattctcatggtgtgagagtgtattctaactcagcaaggggaatttagtaattcccatcccttatattgtataaatcatacatctctaaaactagggaccatctatttaagaagaaaattccaataagcaggattattccagtgccacctattgttgctgaagctcagtgttagtgtcatcatcaaaccccaaagaattcattggaggtccgaagctgcaaggctcagctgatgcttctgcaaaaacaaagcttcatgccttctgggtccacacagtgtattgcagcttctcaattctaggcaacataaatagctgaaaacaagaatatgttttaaaaataaaagaggggggagctacgagaatgagaagggaagaagaggaagaatgcagaggtcatgagagagcagaaagtttgagtcaggtgtagattagaagaaaggttatgtgataggtagggttttagttggggggagtggtaggggaggaagggagggagaagggtactgggattatcatgtaattcaatcatgtttgtaattcaaataaaaaagtcaaaaaaataattcagtatgaacaatgcaaccttttatgttagtcaaatagatatagctcaaaagagtgggattcttccaaagtgaaggtcaacttaacatatcctaaagctgtttgcattgagataattttctattttgctctgtacatggcatccatgaatatgctgttggcactttcattactggtagatttccttcatctattcaatctgtaagacaattcccagaggttgtttgccatttattaacttttagacattctgatgtgtatgtgaagatcttttgtgaaacactgcctaaatgtgaagcatcgttacagttgtttctaatgattctccagagtaaatgaaggaaagtcaaagtcagctttggctatgagtgacccatacttactaggaaacataaatgatctggttaacaagcattccaatttgagacttgttttttatggatagggcatccttcgatcctgattgttttcatcattcttcaatagactatgcttctcatcacccagtttagaatcacagtcttgtaaaataggtttctataagccgttgactctcccagtttacagttctgattccctgtactgtaattcaaagtggatgctaccacacagcttggcgagccctgcctgtgacaggttccagacttgttttccatcctattatacattgaaccctgtttcctcctcaagatatctttactgaatattcacatacttcctttttaagccagttactttctatagctttctaataatttctttcctctacagtctttatttccttaggaacccacttgcaaactatgtatttatccctgattaaaaccctagctgtaatacacctcactgaaatagaatagtcccagaatccccattgatcaaccattgcccaagccataaatatggcttgaattttgctttcttttaccttcctggataagtgactggaaatttcttttgtttgtaccttttgttttctaaacacatggccaggtgaaggttcagggatttcttaatttgagtacctttcaattaattcctttcttctcaatgctaattccacagtatattctctagaaaacagaaaatccctttgaagaattcttcagctaaaaatctccaaggatatctgattatgtattcagtaactctaaaacacttatcatggtgccaaaacatgaaataaaacaacccaactaacaaacaagacactaacactcagcttcccctttcctttacaaaaggaaacaaacaattattaaacccttatgtgtcagcaaactgtaaatgccatctggtcacattttacacattgcaactgatatactgatatattacctgttgtaaataccaattgaacaggatgtaggtatgggttcattctattttatttacaataaactcaagtttatttacataactgcattctaatttatttacaatagccagcccttaccctggccacatggattttattgggcctacacacaagcttgaacacacacagatgatgccactgaaattctttgtacacttcattgccatgctcatcccagtctggtaccatgttgagccctgacacatgctatccttcctcctagtgcagtcttttgcactggttgttctgctgctctctggaatgtcagttggagtttgtttgcagctccttgggacctcttccacacccttgctgaagctttctaggatcaccctgctttacccagcatcttcatttctttgctgacactcatacccctcttcttgcatttcctgccatagcacacaaacatgttcaggtcccatttgtctgttccctgccacactctgttctgggagagcaagcacttggctttgtttgcagccacagttccaacctagtgtaccttttagagtgtagtagattctctgtaaccatttgtttctccatccattaaaaattaagacatgtaaatttaaggaaacaagaagacttaagaagcctgaaatacaaaagccagaaaggactcacacagagtccaacagacacatttggtttcagggagtagcacaaaaaccacaaattaaaatagaagaagtagagatacaagtgtgaattttatttaactatgaagtcagcagtatttgaacctggtaactactacttgaccatccttctatgaatgtggaacttctttgcacattttataaaagaattcttcctgggattggcagcactgagacaaataccagtgctttacttattccttcccaaggaaggatccttaagatctgcaattattgtagcccaggacacctgaagtacatgtctaaggttactgtgaattgtaacaagttctgcaccatcattttcctcctcataaacacttacatgaaatagatattcataggattaagacaggtagaattgataataaccaaattgtggtgtatttgtggttatgtgctcacactctatgtcttcattcactcagattccaagaggtgagaatgtgaagcaaaatgagccaacttcctaagtaaactggcaacttcttgaattgggatgctactcaggggtagagctttgccatatgtcatggaaagcggtgactaatacatatcttgatagaatctggctaagttttgtgcttaaaagccaagtatgtttgcttagtttttccataccctcagcagtgtgctcccagtgatacggtagtgttactgtgtaattgtgaattattacaatgaccataacaagatcataaattggagaaacaactaaagattagatataataaactatttacagacaatatcactatatatttttaacgtgcttcaattttataggcttagaacagcatagtagaaaatgcatgaggacttcaaaaccaattagcaaaataaatcaggatcttatcaagaaatgcagtggatccttgggtgggctattggattgtgcagcctgatttgtctttcttaatgtcaatgtgggaaatacaaaggctacagaagaacggaagcccattttaagatacaactcttcagtaacttctatggttaactttccctatcttctttcacatctgtgatgaacactgtgattaacatcagcagctaccacatcatccacagctagtgtctgccttccactttcatgactaccatggcttccatgggtagtacctccttccacttttgtaccttacatgaagtctgtggagttagtgactctaactcaggtttaaagattaagaaatgaaggtcagaatggtcagtgggctgatcaagtcctgcaaatgccagaaccactattcgtcatacattatgtgtggctttcagcctacatttgtcttttaacacctggaattaaatatatcatcttttgttttaaatcaaaattatattctcattttttatagattacatttgtgcatttttaatgctattttctaatatctacaagtaaaactttccaaaagatattcataggcaaggcaatatatattgtttaaatgtattattgttacatcatttatttcaatgcactaaaatattctacccttttagaaatgatactcttttagaaatgatgccttctgcccttttaattgatattttcttttaaaattaagaatttgatgttagaaatttcaaaatcttaaaatttatctacttcaaattgaataccttgaagtccatccatttaagtaaatagtgtaactatattataaagttactttatagctaattaccacagacttttaaaagaacagttatggaaaaaaatgaaaagataaattttaaaacagtcttacaaaatatttttagcacattgtttgtggacatcaatgtggcataaagagcatggaattctaattttttaaatgctgaaagcagtaagaaatccaaataatttaaaaatagatataattctgtcaagacttaaatgaataaaaaaataatttttggtacccaccagctgcttttaaaattgtctattaataataaagaggaattttgggaacaggcaaaagctcatggaaacaaatgtgtaaactcaactcctacctcagcatgcaggttgttactcccctgaaatgaagcccttgtttaaaaaattatacatttttgagaattttatacatgagtcgtgtttttgagtctttttcaccctccctctctgcatcaactcttcctgtgcctccctacccactgcctctcaaatcaaaatctccttctgctatatacacatattaatatatttgtaccgcattccaaaatggcaacattcattgactaaccaaacaataacacataaaagaagacactttttacacataatgtgtgtatatcaggtatatcaggtaggcagattacaggaaaacagaaatttcaactacatttattaaagtacattttatgttgctcatgggtatatctatttagaggaaaacacttgggattgaataatttataagcagcttctttaagcattcaggcattatgatggcctgtccctgtcacctggcagaatgaactcaggcagtaagtaccctggtcagcccaggtgcaaacgacccctttaaaagaaagacctctgtccacttatgctctcttcccgctctcccatactctcttctatcctctatctgtgtctatgtgtctctttacctcatttctctttcatgcccccccacccccgcttaacttctcacttaagctctatctgcctggcatgtttgtccgtccacctctgtcaccctcacctgccatggaatccaccaaggtccctgttcaaggtccccctccctcgtgctttatcttaacagcctcaatcctaaagaatatcaagtctccctttctcagtaaccattgatttcctgtaacacctcatctaacagtgggtccggaggcatttcccccgtttgcattggtgattcaactggcactgatattttccgggtcttgtttaggcaaatatgtggctgggatgtataggtgaggctttgccccccctatctagaaggtactacctggcagcagacaccctgatcttccagcacctctgctgtgattttacctgactactgggagtctgggctctattgtattagtaacacttggtgctgagcaccacatggtccttcactcatactctgcattttagccatcgggtggatctctgtatgctgtatacaagttttagaagggagtttcattaatgaacaataaaaactacatttgtttgtacagataattatttagctagaaattatattagtttagggttggagagattgatcaattttgaaaggattagaatcaaaatcaaatgacaagaaagtatactattatgaataataacaaagtaataataataacattattattattattattattattattagaagaagaagaagaagaagaagaagaagaagaagaagaagaagaagaagaagttaagttgaaaagaagacaaaaaacaagcatggctacaacagaaattacacaaaacaagcgactttttcatcatttagcaaatacattcattcataagtattcccaggagaactggaggaaagaagctgttgctactgaggttgattaatcagctaattaaaacttcatttgtatggagaggttggaatgttccaagtccaatgacaaatcatcttggaccacccttcatccctttaatagccatttattggcctgttctgtgtatgacctcacatctcctcagaatgcataaatggaccctagtttctaccaatcaaatgagtgtcttcacattgtatctgaagcttgttgttggatttctctgcttttctataacatgtctgcccaatatcaaccaagcaatatttgaaaagtgtcttgatttgtggcttttttgtttgttcaattattaaaaacaccatctaatctccaccatactggaatgaggtatgtggctaaccctgaatctgtgtcgtaggtaatggtcactcatatctggctctggagtaactattttgttgatgtgaagtaagagctgtttctttaccatcatggacgcatttaaggcagggttggactagttagaagtcaccaaatatagttggttttctctagtttcagagcacattaaaacatcttgtattattctcacaggtcagaatgggatggacaggtttccagggggaaaggaatgaaagctgagttcacccttgtcagagaaaaacctgcacaggtcactttactgcctgtaaacagaagcaatcaggcattttgaaagtttttctttaatttacttgttaatgaacctaattaaatataagtaaattgctaatttatggaaagtcaagaaagcatgttgttaatactagacagtactgcaggtactggtagatatttctagaaagatgttcataaaccactggcccattcaaaaagagaaatatggagacagacaggcacaaaaggaggggatacaaaatgcagcttttccccagttttgtgagctgagatggtgtcgaccaataacacccaagaaaatgcatccatgccgggcgttggtggcgcgcacctttaatcccagcacccgggaagcagaggcaggcggatctctgtgttcaaggccagcctggtctccagagcgagtgccaggataggctccaaagctacagagagaaaccctgtctcaaaaaaccaaaaaaaaaaaagaaagaaagaaagaaagaaagaaaaaaggaatcctctggggttaacacacaattaaatcttccaaactttaaaaacaaacattgcacaaacatttacttcaggtgaatatcatggcattagaggtggggactggaagagtcattctattagttacatgtctcatttctgacaaatgcagcttaaagaaggaggcctttgttttggtttatggtcccagggatgcagttcatcatggcagggaagacatgactgcaggatgaggccactggccacatggcctccattgccaataaacagtggaatgaatgtggctggcagctccctggctcaatttcattcttggggaaccctgctccatggaatagtgaggcctaagcaacttaatccagaaaattcctcacaaacagatgcagaggattctttctatggtgattctaaattttatctagtcaaaaagattaactacactcagtatttactagggtcagctgaactgggttaggccattagtcttattgactttgatatgcaagtatggttgttcaatgctcatgtgtgaccatctataagaacagatagcacacttacatttagctataatataatgtgtggataaaagttggaaaagcaatttttaataaatctcaatttttgagtatagatttcctaagtaaacaagctgaggagtaacacatttaattacatgaacagaaataaaattttgaaggtaattttcttaatttctaccaataactgatcaataactcaatatttaataaaacccttgtagctatatttaaaacatagaaagtacagacattattttaaataacaaacactaataataaagattaaatgtactaaatgtcctgtagacaatttttaaatatttgaaataactagctttgagtttgtatttaatcttgggtattaaaaataatttgtactaagtttatatgtatgttcacttattagccaattcttattaaatccttttgggagaacttttatcatggaatttatttcataaaatatatgccttgattgcacagagaaaaatacctagtaacaaaaattttgtatcagagaccagttaggtccagatcatggagttccccaaagaccaataaggagacagagtcccatatgtaaaagcagagagtctttatttaagcaagctcaagcttgggctctccatttgttcaaagccgaggttgagaacagagagtgctcagcccaggtggggtagggtttttctcatagtataggttggggagatgagatttttaggattcaagacactgattggctgacatttgtctagaggtgtctctgtgaaaagggatgggtatgtgcttaagctaagggacatttagatgatcctatctataatggctggaattttaggaatttcctttgtcacatttggtactttctctttggttatgtctgttccaatatggtgcccacatggtcccagcttgtggtctttcctggagtcagttgctgtcccatagtatactaagttggcatccactgagccttggcatggcagaagtacaaacaagcagcaggtgtgtaccaagttgccttgggccctacaagacccagattaaaagggagcaaatagaaaacaaacacatcaactcttgtgccaaattctgaactccaaaatcaccaagagacacaatccaatgtaaaagcaaagagtcttttatttaagttaattatgttaactcagttcctccatccatccaacacagtgggtacagtgagagagacccagagggacctaagtgcagagattttattggggtagagcaaggggagtggctaggggtccacaacagtctcaggattggtgcacttctgagcttggacagcctgtcctgtgttgattggtcaactggctactagggcctataggcactcccagggcacttgctgtgctttggatatatatcactgttaccttaaatcacatccagagcctgtaaagtacatccagagccaccagctaacttctggttggttctttgccacatggaggtttctggctttctagtgactggggcaggtccagcaaggccagaaggtcagaaactatgtgctgagtcagaggcctacatctttctggctgttttctgcagcctgtcatgactgccaaagtagggggctgggtgagggtctggtcccttcagtcttccactggttcatgtttggaaattgttctccagatgcatcagtaatcatggacaatctatcaagaaattcaaagatcttagacataattacatgcagtcagagagtatttttatttgaaaatgtcaaaaatgttgtctccaagacaagtttctttaatcacttaataaggtagagtgtagacaacaaaggtgaaattacatcatcagtggaaatgatcaggtggagtcctaatctagagacctagctttggtgtgaaaccttgatggaatattagaaatatatgtattttcattttagcatcagaggatcaaagttattacagatttttaagttgctagttcagggaatgtgagagagataaatgtgtatattcctctgtgaaatttcctaatggctacacatatctccttggctcaatcagagagtctttggcaggacttgcctaaaagtcaggatgccccatccccacatgctgaagttggttattctataaggtttcccccctgaactgagtattgactatcagagagctagaatcagtgggttgaagttcagcccttctcaatttccttatgcctataccgcattgaaataactctccagcattgtttctccatgaactgtgtccttcaacaaatagccttctcgaacttcgatgtatgtccttactattgctcccctgagattatttttctactttgttacaacaaaatctgtcttctgaaaggctataaaaagaccaaaacaactaggttatacagagagggacttttttatagaattgtcttccatcttttctccaaattatggtctgagtgagaactgtaaactgaatctcacattcttccattctacctatcctgccaagtactgtatgaatctcctcagctttttccattcgatatttgactacagccagctggaacaagatgctccctacttcatgagattattcaaggcctctgcttttccaggttgatctcatgcctgcctcatgttcatcttctacttaataattgttgctcagctcaactgggccaagaattaattctgaacttcctgggagctggataactggcaagaatcatacctaatcttatgattaatcagtagaagatagctttggctggctgtcgtcaaggtgtgccacaaagagatcacgccatgcaatagatctcactcatagaataggtttattggggatgggggagaaaaaggctgtcttggaatgggggcaacgagaaagagataaagagagacagggagacagagagaataacagagagctgcgatgtctggaggtaccctttttgtttgtttttgttgtttgagacagagtttctctggatgtatgtagcttttgctgtcttggaactcaccttgtagaccaggttggccttgcctattagggtgcacctgtctcatacggaaagatgcaggtagacagtggaaatcctaagtatcttgcaactggtgatgatgtgtctggtgtctgcagtgttgagtccctgaagggcagcctggaagaacactagatttataataactggatatcactttgcacctttgcaaacacttttctggactaacaacatcagaaattatggcaatcttacatgctaaatcacaaaaagaaaccatgcatctctctctctctctctctctctctctctctctctctctctctctctctctctcacacacacacacacacacacacacacacacacaaacacacacacacacacacacccctaccacacacacctgctagatatcttttgcatatatggacaactacttagaaaagctgtatttctataaattctcaaaaagctgtcaggataatgggattatcacccaaggtttctgatgctatgctgactctagattaaagtgtgtgtgtggcctctgtactaactatggacatatacctggtccaacacctgagacacattttcagtctctatgtttcaaagattttctgttcagcttaatccttggaaaatgaatttaacctcagccttgaggacatgactgtgcatgtataaaaatattcccagcttaggtatgctcattcaagaaaatagcaggagaagatccaaagaaattactgtgaaatcagcaagaagtgagaggtagggaggagactgagaaacagtgagggcctcctgcagagagctcttgtaccctgaggtgcatgaatttcctctggtcagaaagaaacaatggaaggcttatgttacaagggggtgaaagggctgcatttgtgctaatgaggataaataatcatgctaactgctgctgatcaccccagcatggtgttcacttagcatttctcaagtcaaaacaagtaactgctaccctacatatgaaaggattgtgattatgattggggaagggggacaaggactctctacttttgtgtttgtttactgatgaaaattttggcactaactgctatcaaattctgattctactcctttgataatagccagcaggttaatggatattcatgagtccagaaatatgtaaagtgctggttgtttttcctgacacattttaagcactcactgacatttagtataaaaaaagagagtgtttggaaatataaaagaggtaaaaatagtgtcagaataacattctatggaatagggaaaggagaatgaaatcaagatcacagttgagccagaagcatcttgctgggaagatgcagctcacccacttcctagaagggaaggtgggtgttattcttttgtttaaaaagaagaaaagagaaatgctgagacagacatattgactataagtttattataaggcccgacagaatggggagactaagaagaggaacaggagtaaatggctgactgccatgttcggtcgccatagacaggcagagagagagcatcagtgggagacagagtagagagaaagcagagaaaaatcagagcaaggaaacagagagagggaacagagagcataaatgggcaggggcctatcttttaaaggggtcctctgtatatatgtgcagacttcgttcccatggaaccttgggctaaccagggtactgcctgttccacaaggcaacaggggcaggccagcataatgcctgaacctttcattcccacctctacttattattaaaaaaaaggtgggctaaaccaagaggaatgctttaaatgagattttttttttctcaaaaaatcaagcaagcaaacaaatttcaacagagtgttgtctcaatggtgaattcctgagtagtttaactctattcattcagtttggagatagctggccctttgaaaacgtcttaaccccgaggctgtacggaactccctggcgcctcttagacctggcaagatgttgacagcagaagacaaggttgagtttagaaaatttttttcttaggtcctgtcacttgaggggaagattgtaagataagggaggggttcctgaggaggagtcctaacatgagggaagggagtcctgggaccagggaaagattgaattactggagtgaatctgacctgtttgtttggatccaattcagctccctggaacttacaagaatccttagagtttgtggaaacataagtattaggcacattagcagcatattcacgttagaagcaacttgactgaaagcattaccatcttaaaaatagattttttttaaggacaatgaaaagcatcttaatcttgactttgtagttatgatcctacagtggtattggtgaactttattatgagcagtagcatgaaaaaatagagaaatcaggaacatattttattctttttaatgtctcaactcactttatcatcacttaagccgttttatcctcagaccttcataactttaattcatacactttacattaccatcttagaccttccattctcagaccttcataccttccattctcataccttcataacttgtatttatctattgtgttagacctttccatcctcagaccttcttaactacattctcagaccttcatacatcttagactttcctatcttcacatagataaacactaaaatatttgtttctggaatctgttttgctttaagctgacaagactaccagtcgtcaaaagcatcagagttcttgagaaggataagttttgcctgaatcaatgattaaagaataacagagacttgccagcaggctgcatggacagccatccccaaggtcctccaaccatagtagtgggctgcatgacacctgccttcttgctgataacttgtgacctgtggattacagactttgggaagactcgcctaccgttggcccaagcaacaaggggaaagtcgattgggttgtcctcttgtccacggtctggaatactttgtagtatttgtagctgaggtgaagggcagggtttctcagtgaccagcattgtcactgactcgagatgaagcttcttcagtgcctatcagtcatctcgtaggaaatgtggtggggccagcagctggcctatctctctgttataaatagctttttaacaaaacattttaaatgccatattccctagatctctgagcattttagggctgcctagttaatatcttagcagttaagtttgtctttagttagagaaaaaaaatacctttttgtaaaaaaatgttgtaactttgtaaatgacttacagggtggactgagtggtataaatattttgttagtttgaaatagacctttgtgattttaaattttcataatcatttcaagatacatgggttaaatttaagttatatagacttagcttatgttttaagtatagttaaattagacctttatgactttaaatgtttaccatcatttaacgatacatagcaatttagaaatatgagacttaacagttttagttgcatatagagctagataagtttaaaattaaattacaggtaaagagacaagcaggactggataacagtacaggggaaccagaatgtaatctcagatccgtacattgtagcaaatgaacaggagatttaaaggaagagagtagatttaaacagagagccagggaaaggaacagtatttagtaaacaagccatgaacaacagagccagtgaaagaagaaatcacagacaaataaaataaaataaaataaaaagcaaaaagatctggcagaaataaaaaatccagcagacaggtttgctggcacaggccgctggagctgggcatgcctacgggtaggtcacatgaccaaaaaggtggggaccataagccgcttttgtctgtttacctgcttgttggatgaaaccagaaaggttcctctatgcatttgccatgggtgaggcaagtggaaaaccagcaaaaagctcctctatggatgcnnnnnnnnnnnnnnnnnnnnnnnnnnnnnnnnnnnnnnnnnnnnnnacacagctgtcccgaaaccgaaaaaggaccagcggcccgaaccaaaaaatcaccactcctggagcaggatcccatgcctgaccttcaggaaatgcacccaacaagtaaaagaagaaataaaaaacaaaatgtctggtagccatggttgcctatgcaagtcattgaattgagtgggcaggcctaagctatgtcaccttgttatgaccaagatggctgcccccaggttagcctacatggttgagatggcgacccctgtaagcacattctcaattgccagaaaagtttcaaacctcattcaagtggaaaaatgaaaaccagcaaacaaacaaaaaactcttagagcgtctcatgcagacattgccaaccaagaagaagcacaatcagagacagagcaaagagaacaatgaggaacattcccaggtgaaagtaattttccattgggaggcagaactccgctcatttacctactcgctgccagtaaccgaaagatcccgtagaaatgtatttcccgtgggcaagaccaaaaaatggcacagattgccctctctgagagcacccggccggaaactgaaaaatggacccagagtgaacagtgctgggtctgccccatgggaaatgttctgagtatcttaccagattgcagcgaatagtcagatcagtgagttccagagatacttagttggaaaagtggtgagttgagttctggcatctcaggctgctgcaggcaggagggagtaccaggaaaagtggagatggaactgtgttatgagtctagattttaggatccccgagatttcctgtgctcctggcaggaagagttacaaagaaagaatatcccaccagctagctttgggagagggtctacagagagagcctaaaccaagtcgagtgccaaaatgttattcttttgtttaaaaagaagaaaagagaaatgctgagacagacatattgactataagtttattataaagcacgacagaatggggagactaagaagaggaacaggggtaaatgactgaccgccatggtcggtcaccacagacaggcagagagagagcatcggtgggagacagagtagagagaaagcagagacaaagcagagtggggaaacagagagagggaacagagaacaaaaatgggcaggggcctatcttttaaaggggtcctctgtatctgtgtgcagatttcattcccatggaaccttgggctgaccatggtactgcctgttccaccaggtaacaggggcaggccagcataatgcctgaacctttcagtggggtgcgtgatgaggtatatgatttgacttgctctactagtacaggaaatttatgagagaaaagtcctatcttgccttgaacttgcatgcatatagcagatgtgttggtctgctgcggggactgtgatttattctagatcatcattaattgaataacaaaaacagaaacaagagaaattccttggtgttatatacacatacatctgtattctaattctagggtaaaaacttaagtatgctataaaaagcagaattagaaaattgcttggatatactgaatttccatccattttattataaatgaatacataaacaataaaaaaaagtttaaagaattagttgtgatcactcagtctttaaattcaaaggttttattttgtttctctcttcaaatcaatgtccacaggttcacaattaaattgagcagccattctcactgatttatggccaaccaaagcccagggcaaatactgtgtccttatgacagtgcattgacccctaacctttgtattgactgttgtccttcgctttggcaatcaaagtcagacatgatttccttccaaaatcctgactcagcttttgcctcacgccattatggttggataatattttcaaagtaaacatacatgtcaaattaagtgattgaaaataaattattcagggttggttttgaaatttcacgtaaatgattatagttagtgttctgtagtcgtttacctggtaatttgttatgctcttattctacaaaccatctgaggagatacaggggaatacccaaagatacaataaagttggttatattttttcttttttttatttagaaaaaatcattttacatatcaatccccttgttccctctccctcccatcctctcatgccccctaccaccccaccctacccaccccccacctgctccaaaaggatgatgaggccttccttggggtatcatcaaagtctgtcacatcatttgtggaagggtctaggccctccttgtatttgggctgaaacagtatccctccatagtgaatggactcccaaagtccatttgtgcactagggataaatactggttccaccattagaggtcccatatcctgcccaggcatcctaactggtacccacattcagagtattggttcagtccagtgctgattccccagctttatgactggggtccatatgctctcactaggtcaagtcagctggctctgtcgggtttctctagcaaggtcttgactgctttgctcatccctcctccctctctaaaactagatcccagcagtatggttcagaaattagctgtgggttcctacttctgcttccatcagctactggatgaagactgttcagggggcatggtttggtcctatgtttgttccccagttgtcagactggggtccatcagttcccactttctcaagtcaactgtttctgcaggttttcccagaatggccttgacccccttgttggtcactcctcactctctgaaacttgattacaggagttgggctcagtgcttagctgtggatctctgctgctgcttctatcatctactggatgaaggctccaggatggcatttaagatagtcatcattctcattataagggaagggcatttaagatagcctctccactattgcttaggttgctagttggggtcatccttgtggctctctgtacaattccctagtgccagatttctatttaaacctatagtggctccttctattgatgtgtctcttttcttgttctcctctattcctctccccactcaatctatctgatccctcttattctagtcccccctcctcttttcccctcctctttctcccaagttggtttcatttttaagtcaaacactatccataatatcctagaaagcatacatcacaattgatcaagagtgatgtcattaaagaggcatacagatggaaatctaaaaagatcagaataatattttaatgttcctttaaaatacatataaatataacacaaaggcaagagatttgcatcttaaatggattgcaacaagaaagcaattaaatgttgccaaattacaatcagttatagtaggaacataaatatcatcatttggttaaattagttaaagtgaaaaataaagagtacatccgttaatatatatggaaatttttatatctgatctcaattacatgatcgtatttgcagtttctttagtagtataaagcagtattttaatctctaaagtgtccacagtagaattttggtgctcttgaccatatggccttcatcaaaatttgtttactctaggtctgcagtgtaaaggaaaccatggctcatcagtcaatttaccacactgactgagtacctgtaaagtttagtcagtaatattgggcaagagggcagttgtttttactctttatctattagaatttcaaaatgaataagtcattgagaaaatttgattgtgatgcatttaaaatgacaatcatttaagctgttggcacaattagtgcaatcaattgcatctataaagaaacaaaaatatggatatggccatatttatatactaaggtattaattttacacattattttatagtacataagtagtgaaagaactttaacttctgtttttgttattagctttgtgtttagctgggcaataacagagatactttatatttacatatcaaaattcaaattgcaatactctagtgtgaataattttacctatgtgtgaatgtgcacataaacatacatataacacacataccttttagttaattcaagaatatggctctgnnnnnnnnnnnnnnnnctttgtacttccttctttcagatccttttttttttaaatcactgccatattctcagatatatttaatcaagaattaaattggattgtaaaggaaagaagttatctttgaaattcacaattagggttagatgactaagtatttcatttgcacaaataaaatatcaaagaaaaaattgatgtcatagataagatagatgcctgtacctggtctgtccacatcctgataggttttccttataggccagcctcctgtagatgtcagagcctgacctcacaagaaatacaaatactccctactaaattttgcttgtagaaagttttattgtcattgttttatttttctttgtttttctttttttcttctttgctttttgttttgttttgttgttttttggagacagggtttctctgtggctttggaggctgtcctggaactagctcttggagaccaggctggtttcaaactcacagagatccacctgtttctgcctcccaagtgctgggattaaagttgtatgccaccactgcatggcttcttctttgtttttaatatgggcaacactaaattatttggagaattcagaaattcaaactttacagtgcttaaggctgttgataaaatagtatttacttgctcattgttcccatgtaccaggtctacaatattaaatgcctgatgggaccaggacataataggggatattataccagttaaatagggattatacatacacatgttagaatgcataatttaggaatttttcttaaagttataattattgtacaaattcaatgtaatagctccatatattcctataattccactgaaggtaaaatatcataactttttatttaaaaataactgactgttctacaagtcaaacaaagtgtacctaggattagagtcaacattaggtggtttctctgactgacacatcagatttgagtaatcagttcacgggtctatcctcagatgactggaaagcacagctatcagaagcctttctcaactttgcattggatttacttgtgaagaagtgttgtggatgataacatgtgtagctaatacagacattcaggggaacactgaagtccttaaaggaaatgaacatagaagtattgataaataaaaatggaaggctgagcaattaacagaaacatcatcctacttctctttgatgagctattctgaggtcacatttttatttgctgttagatcttgtttcagaaaaactttctaaaaatgatcgtaaaagaaatgtaggcatagaaattgcttatcatatatctttgcaaatgcttatactttgaaagctaggagtcagttctcacattatagcttaaaaaaagaaaggtttgaataccatctaggcagcaacaatgagttctggattatcaataaggctgcaaagatgtggatctaataagcaaatgttttgtcagatatttcagaacacccaatgtgggacctacacgaggacccagtcatttaaactacatgatatgaatacacacatacagacccacacccatgcaaatgtgtgtacaactatccaaacacaattatataagtgtacttgcaacacacacacacacacccacacacacacacaaataaaataagcaaatatcaacattatcacctcttgtgctacacatacgaaggccagaggttggcaaagggtgtcttcctggacagcattttactttatttactggggtaatatgtgaaccccaaacttgcctattgaaggattctagcttctcaacttcatcctccaggaatcttctctctttgccttccaagaactaggattacaggtagccaccaaaactatccagtctttaagggggtctgagctctaatcttcatgtttgtttgaacagcttgatccactgagctatatgccttcactttcattaaactctgcagagccttctggtattgacaattttttccttaatgttgctcttttgataatcattttattgtgttaatatttaaaaaacacctgccttgcattttaggtttccagatattgtttgttgcaattagatggattcaatggtttgaacccatattaatgggcttgaacttcatatatgtgaaacaggcttctgtataaggtcatcaaagggccaatgatggcaagaaagaagactgcctggaattttcctctggagagcttcaagacatataatagatgatcaaatgaattccaccaggggtatgtgttgagaggaatggtagtcagacacagagcagaaaacagatgagtacttttattattttagtgttttgctggggcagtgcagaagttgtcgatagtatttccaaatttctctcatagacctcagcattgcatttgttctgagttttggactgctccccaggtgttacaaagaggaaccatcatctttcagatggatgtttggtatgatccatgggggacaaaaacagattgctaaaatttatagcatcttttgaagaggaaatagaagttatatttagcaatagatgattgaagtaaatactactgagtagtaattaccagcaagctaagtactataaaaggtttcaaatcaaattcctgaattaaataataggttaaaatgaaaagagaaaaaaatacttaagaactacagattgtggagtggagtagatactgttctgaatgagaaagatacaggaattcctccaaaaaaaacattcatgtaccctaagcagatgcttcctgactatttaaaagtgaaaataaagaaggatttggctgatgaaataaaatgtttcaactttcatataataataagctagaaagagttagtcacaatgagacctatgtttgatgaactatgtaactgaaatggaattctaaacatccttcaaagtgaatcctagctaagaatttatactgtacttcctttcagcatcttccaatgtgtctttccaatttcacacacacacagatacatacacacacacacacacacacacacacacaccagagaaagagagagagacagatagacagagggacagacagagaggcaaacttacatctatacatacacataaatgtacacacagaaacaaaacacacacacacacacacacacacacacactgcactaaaatatactaaacaaattctttgtgttactatatttcccaaaattaaacttgcatatttcctttatgagctctgtgttgaagagttattttattctattgctagaacataatatctcagataatataatttataaaaatgaatgctaaattcactctttgatgttctagttttatcctaagcaacttaggaagaagatgagtgtgatttgtactgatattgaacccagttcctttgcaagaaatcttgacatactagctctctctccagcctgaggggagggatttgcatttacatttaatgatcacaagaatgttgggtgatgaaaacatctcctaatttttttcttttcttccttttaattaaaatagatttttccctcctatactatattttgattacagtttcccctgcctctaattttttgtttggttttattttaatgaagtttttttaataagagaagaaaaagagtaatccataactagaaaaatatataaaaatcagaattcagaatccattttttatgtaaacaaccaaaatcaattagaaatcctagagggttttgtcaaaaaggaaggaaggaagaaagaaaggaataggaaaacactaaattagaatcaaattcagctgtaaaacagataaaggaaagtgcaaatacaaaagccttctgtgtggtcagtggatccctagtgtgtgctcatgaatgtaaatagtgagtctgtatctgctttgcaaagtcatttctattaaagtagttctattatttaatgagccttttccccagtatgcattaaaattctttaaacttatttattgtcttttatataatttgacagcaaagaaaaagcagaaattatcattgaaagtagctaagaaatatattaacataatggttgaaacaactgtattaaagaatatctaaaaaaatattggtcacaagtctgtaacattaaagtctacaattagaaggaattcattgggacagaactaaagagatattaattgtggacagaagtttctgtcttacctggttctgtagaggtttagtcccaaataaacacacatagatttatattaattataaattgtttggccaatgtctcagatgtcttattggctagctctctcttaattagtaaccaatttctattcacatgatcttggcttaccagtcattcctaagcatcttgctaactaacctaagctttaaatattataggtaactatctataatctgtatttaattatatattacatttttaaaagagctatataaacacaatatcttaaacggagtagcaatatacatttaacaaaattgacctaaaatttctataaataaaccaaaatccattccaatgcaaagtattcatttctatatcacattccccttatttttctttagagattgactacaatcattaatcatttataaccaaccccactgaaatgaaaacatttgtaaacaatatttgggaatttgcttatagttccatttgggcatatttgtctccaaagtgcttcctgctgtttggggacactgtcaatcccaaggggatcctgagaaaacccagaaccctggccaaatcctggctgtagtagtctgtgaggctgcatcctctcagctgttttggttgttgaatcacctgggtcacagcttcaggggggtcttgtttgatcaaatcatattagtctgaaaggaatccacagcttttcaattttttgtggaaacaaaagcagaattcttttccagagtaacatgtctttagacttaaattttgaggtcaaggtattttcaaattatataggttggattattccagcagcatttataatcaaatgtcttttagcagctgttgctccttcctcagcaaacaattcaaaaataacacaataacatacagtacctagactctctgtgtatgttccatctttaactggccccttttcattactattttccttttaatatttatttatttatttatttatttatttatttattttgtgttttgagacaaattttctccatatatctttggctatccgggaactggctttatagaccaggctgtccttgaaattgtagaaatctgcctgcctctgcctcctgagcattgggattaaaggcatgtgccaccacagccagctactctatttctttttttaccaactttctctttttttcttttctctcccaaacctatgtatatttttaagcattctgtgaaccatttagaaatttttttttgttcatttcctctgaatctgtctttactgtatatctcaatctatttctgaacacatgagtttttattctgctaaacggaatggctaggattaaagtagaggttttgcctgctggctccaaccagttggctttccaactgaggtttttcctgctggctccaaccagttggcaggggtatgtttaccaccacctttgggagctgtgcttaccacctcaacactggtctatgccactatcaagcagcttatagtacactgtccactaacattttatgtctgtatgagtaaaatctaaatctgctatgcagtatactctgcagcttggaaaaagcccctatgtacnnnnnnnnnnnnnnnnnnnnnnaaaactaatggagtccaggaatcctctatgtttatttttttttcaagccagactgacacagtgtctctgcaacacagccttcacaagactaagattaggaagctcactggggctccattttatgtggaaattcttgccaaacatttgggtggcccttgtggatggaactttctgtcctgcctggtccgacagctgtgaggtcccaaataaacacacagaggcttctattaattataaactgtttggtgtatagctcaggcttcttattggctccctctctcttaattattaacccataactattaatcaatgtatttctacatggtcttggcttactggaaaatgacaggacttcctaccttcccagtagttacatggcattgcttctctccattcctcttcccagaattctcctagtctggtaaccccacctctacttcctgtctggctacatcctgcttgtgcattgtctgaaacagctttattgatgaaccaataaaagaaatgtgatatatttcttgcacaaataaagtctttctgggggtcagagtatcgagcttgccactagctaactgtagaggtctgtaggtctgtggagatagacaggaagttcaaaagctgggcagaaacagaatataagcagggacaaacaggaaattgctcttttctctgctgagacactgaggaggtaaggcatgctgtggattgctccttctctctgatctctcagcatttccctctatttctgactctggctttttactatatagtccaattaagaactccatctacagagaagcatatattcacaacatacataaggacatccaccatcaatgaatcataagagaagatataatcttaaaggaaaggcagattttaatttctaattatgtacccaatatatgtgtaggaccactatcaaagaaacacagatgtcatataaaacattggccaatgatgcagaatgcttaattaactattcaaagatagttaaatttgtttacttgcaaaatacttgtttaactacacaaatatatgttgcaatttttagttatgtaaagatatgttgcatttgtttaattaggtaaagatgtattgctgttttaattgcctatcaaagacatctgattattctaataaaaagctgaatggccaacagcaaatgaggaaggaggtatatgcagtacttctgggcagagagtgtaagtaggagaaggaatttaggctggtaggaagaaagaaaaagaaacacaagttacacactggggctagcctcccagatatgaaggaagcagaaagcaggacatacagaatgaaagaaaggtaaaaaagcccagaggcaaagcatagatgaatggaaacagattcaattaagttaaaagagctagtaggacaagcctaagctaagaccaagctttcgtaagcttggtgtgtgtctttatttaggagctggctagtggcccaggaaaaattgcaactgcaggccaatgcttcatttatctttaaagtgtttgtgtgtgtgtgtgtgtggggggtgttcctagatgttgtgagccacctaacatttctcctagcaatcaaacatgggtagtctggagaaacaggaaacattcttaagtgtttactaatctctccagttcctcattattatccaagtcaaaatagttcatgtgggactatttgagtgggtaagatgagtgactgaaatagcatatacatttcacagtagacttcctatccacactgaatggtcttctggaaggatgaccagctccaagatccatggcaatggcaagaagttcattgttctcatgaaagcctgccaaaacacccagtattttgttatagttaaatcatagtatattcaaatttctcatgaattatataaaacattgcaatgtaataatatatatatatatgcacacatgtatatgcaacctaaaacattatatttacacacctataatatgttcatatgccacatacataaaatcagttatacagagaaaactatattgcatttcattatatatatatatatatatatatatgcatgtatgaatgtgtgggggccgacctgtgtgcagatgtacctgtgaacatatgcttatgaggctagaagccaacgttctgttattgttcctcagcatctgtcctcttcctgtttggaatcagggtgtctcattggcctgaagcccatttacaaggctaggctgcccagtctgtgggactcagtaatccacctgtttctgcctacatccccggcatttgggattaaaaaacacacaatagcaagcatggcttttaaaatgacttctggagactgaacttgggctctcaggcttgcacagcaagcacttttctgattgagctctcccatattccattttatcacacatgtcttttatatactttatcagtagagcatgttaaataccttgaagaaatttgactcagttgttaaattatattattcttggttgtttttaactctttagaattttctatataaacaggagtatgttgtaaatgtattgctttttcacctaaccaaacctcatcaagtttagtaaagcaataaccttggagagaagactctggactgtggagatgtctccaggttgtgcaggatgctttaagcagcagcctttgtgagtcttatccatgctgagatttccaaaaagacccatgctcctgtaggtaagtccctcctccatgctcctacaggtaagttctcctccatgctcctgaggtaaggcctcccccatgctcctgtaggtaaaccctcacctatgcacctataaataactctggtacatttatcttttcacaaacctagactgaagtcaaatctgtcaaggctttccttggtaccctgtcttggatgagaagatattttgtcatgcttcaaccaaaaattctgaacctagtaactgtggggcaactcaatggctattcagaggatatgtgacagttttaaagattatttttactgagacatatagggaagtactatagaagtagaaggtggtatcagaaaatacagataatctctgaatggtaggagcaactcagagataaaatgacagccaaagagacaaagtaatgaagggcagtgctacgttgaacaaacccaaactcgtatcacaggctgttaccaatacaatttcatgactctgtaaggtggtctaagatattttttgtttatagtagcccaataattcagcctttcctggctgttattactgtctcaccaattctaattacaagtttcaaaatgattttattcaccctctgcctctttgctttcatccatgctgggttggttctgaaatcaactcaattttttttatgcttgtacattcaagttctttttcactgaagatgttctctcaccctaaggttcaacctcaaataccatttctctgctataccagcattttgaagaatttattgcaaagcagttgaatgttagagaatgcagtgtggtgtgtgtgtgtgtgtgtgtgtgtgtgtgtgtgtgtgtgtgtgtgtgttatatgactattcatgaatgtgctggtgttccagtgcattgatatgtgaaggccagagtaggatagtggttatctcctctgacacactccaccttattttttgagacgtgatctcataatgaacctaaagcttgcttttcagctatacttgctgcctagcaaattgccagcatctgtgtgtttttgtaccttggatttcagttttacaaacctgttagggaattgaaattaagcccagttgtttacatgtaaacattcttacacagtgagccatctcctaatcctgaatttcagtttatacaaaaataggccttggtgagatactgcaatagtgtcaccaagtactgaccatttttgtaattaattgcatttaactttgtggcaatttggaaagaatggacttgcttattctgtcaattttagagatgagaaactgaactacagaatggtaaatgacttgcttaatgtcacagagctgattaataataaagagatctttaatgacaggtatatattcttccaatgagtaaataaaattgttagattcatggaatttagtcacacatgttctttcttcattgttttctttattccacatttattcattgtgtgtatgtgggagagtgcatgtgtgctatactgtgtatgtgcaagccaaaggactccatatagctctcaaggatagaactcaagttgttagaccaggcagtagatgtcctcacactggccaccatgttcccctcctatttatttcatgtatgtctgggaacaggatctgagtctgtgagtcattccttctagcctaagcagttgacctaggatcctgaatgctgcagttgctttttctttaatggaaaagtgacataactgtaactttttctgtttttttaaggtaaaatagagcaaagcaagtcagcattttgatctacagtgccctaaaattcattgtcacatacgtgaagaggtgtcatatgccaattctattttagatatggtcaatttaggaataaaaaatagtctcatgaatgtatgtcaacatggtacatgactcaatggttgcaatatatttgaagtaaaaaaaaatatggttacaattcgaaaatattagcttcttactaaagaataaagcacatgaaaaccaataatctctacttgttttatcatactcaattaacaagtaagtgttttttttgtgccagtaagctaaactcttttttggctggtcaaaagaaaatgtaaattagatatatattgcagtatcaccctggcaatggaacataccatgaaaactaatggagtcttcttcattctcacctgttctagcctatgtgttgccctttaaaagacaaataaatgtctttttaaagacagcttcagaagcttcagttgtctgtaaatgacacatcttctgtttaggacaaaataattttaacataatgtcaagcttgttatgaatcttgatagatgacatgagatgggatttaaagcttttacttaatgatcatctagtataaagtcaaataaaatattctccctttgatgattcaactatgacattaaggtagtgatataaattttaaaaagtattagtgtgcatttaaggattttctgaaactgtctatcatccatcacatgggatgtggataccatggagccatcactttggagtttcctctcgattggctcctcttcattcacatctgtacttccaggcctaagaacccaaatttctctgagaagacaaggtaaagaaaatgaaaaggattggaaagtggctagcaacccaattgagatcctttttcactaaagttggtatccacattttgtagggactgtatgcagccaagcactagaggagacacttgaaaccctccctatttaataatttcctccagaaatattgttatgaggaaagggaggaatgactgaagccccagggtctgcctggagatgatcttacatggttcttgctcctccttacatgagatgcagactagagccaaacaatgatgggtcaatgatagatgggaccaagtctcaagcaagaatgcttttcagtggatactgcttgtcctctatttcaacctaaacctcatgtgagtaattaatatgtgctttcagggtcactgtaaccattgtttaccatcttccccaacatccccactgctattcattattagatgtctccttagttggtccactggggatgtcccacctagcctagctccttgaggccacaattagccagagtttgacccaaacaactccagcaatgaaaatgctaaggcaagaaaaaagttttgtaaattatctaaaatagttctcacaaaaggtgataaaataaatatttaaaacatagtcaggactggagagatatctcagtattgaagagaattagatgttcctgtgaaggatccatgttctgttcccagtgcccacatggaagctcacacctatctataacactagttccgggaggctgtcctcttgtagcctcatcatgttcaagtcacacacatggtatacagacatacatgtaggcaaactctcacaaacaacaaataaaataaaatgaaataacctttctaaaatagccgttttcatttgcattgcatcaaatatctcgaaataccatctttcccaacagacagctgtagtaaaaagaaaaagacatctcaattgactataaagcaagaaataaaaactgtctacttacttttcaaacattgaattattaccttaaaaacagttcttcttgaaaacttggatgatttatgaaaaggcataacaataaattaagtccttattactttgctttatttttgtaaggctgcagcatcttattaaagatttagattaaaatgttaaatttattcaaacaaaaataagtcacctttacaattttgtcagcctgacagtgtctaattggttaaaagcagccatagattaaataaatgttgtgcttcgaacaaatctgtcaagtcagatttttcttacactctggggaacaatagagtgattcttgtgttaataatttatccatatggatatcacagtcatcatggatgcatatcatgttcttctggagtacctccacttacttccttgccatgtgagctgtcacaagttacttttaccttatatagaaaaagaattgtttctgtcccctaaaaagtgatctgctgcagactgaagagatgacttcccagttagaagcacttgtggctcttgctgaggactggagttgagctcttagcacccatgttagatggctcgtagctgcttataactccagccataggggatctcatacccccttgtggtttatgtgggcactgcactcatgtgtacaaacctgttccaagacacaaatgcatataattaaaaatcaaataattgtttaaaaagtggcgtccagaacaaatgagattcctagtttcttttcaactttacttttcacctaagattgtacttctggagatggtcctggacaatgattacccaatgattttccaagtctaaaactgcttgaggtatgaagtatttgttggtatgtcatttcaaaaataggaagcagagaatgtaaatttttgtatgggaatcttctggttcctgagacagatctgattattcctctgcttgctcataagggttgtgcaactaaaatgagtttcagtagccaagttcttccaatgtgatctgttctaacaggggtgtaatctattcctagttcatattagttttcctttcttgatagcacaatgttaagggctttatataattctgtgcatcacagtatatgtccagacaactacttcacagcaggagtattaaggatgtgaaatcaattgcccatcccatactttagtacccaaagacatatggccttacacctagactctgaaatgtaacatttaatgccagcttgtagagagaacataggatttatgaagtactatcttttaggactcaatgtatttattgacccaagaagacactcatatggtcccctattctcttgggaaagcatgtttgaattctgattactgtaggtgaaagcaagccccatttgacaatacttcaaatgacccactggaggatttttgctttcttatcctcacaaatctataaggttctatgttgtacaacaagatggaagcatatacttgccaggcaacacataaaagtttccccagaaaacagctttatcatagctgctgccagcaacatattcccagtaatcagcaggcaattacagatttaactatagccaaagttaactgaacatgatcagcagaaaagaaaattccccctttgggagatgctgaaaagaatatgtgtcatgccacatgagcaccttggacactctcctgaattatatgtccataaactaatgtgaaaagaatcaagcagagaaggtaatgttatgaaggtttggatccatgagaatgaaattttggttttctgtctagtcaaggcccaaatactgggcattggtaaacatgaaaagaccagaaacagactgtgaaaatctttggagatcaagtcctcataactacagctccacatttcttcttaaaaagtgtagaagagttggttcttaaatttaaactcccccatcccttcccacacaatttagagaatattttgtcatttgtttcctttcctcttccacctcttcttctcctccatcaattgtatgttgccagctagttttaggatgagtccttctcttgtgtccagttggcttatatgagtactcatatcatttcaaaacaaacaaaaactgactcccttcttccagcagctatcaaatgctaatggtgcctcagctagtggtgggaatatgtgtccgctccctcatgctgctaatttttaatgttggatcttccattcctgttgtgaaacctgtaattattaaagagccacagattgtatgttctgaaattcatctccatgtttatggcaagttcacaatttcctcaacaagcatttgtgtcattaatgattctgacacagaaaacaaggcagagctaatcttaaaatccttcacagctggggctggaaagatggctcagatgttaagagcactgactgatcttctagaagtcctgacttcaattcacagcaaccacatggtggctcacaacaatctgtaatgagatctggtgtcctcttctgcatgcaggtatatatgcagggagaacagtgtatacataataaataaatacatcttaaaaatactttcacagccattgatagctcactttggctcctgagttccttgatgggcttcacaatttccccaagctatacttcagtcatgacaatttcttttatttctgtgctgctttctccatcatcccttttctttggatcaaatttctcccaactctcttccttaaaatgaaggtgtccatctgttaagggacatgggccctaaactatgggttttaaggccatctctgtaaacccttctatgagcctcctgtaacctgtaattagatggtttggccacagggaactgctaattgcttctgttccgagaaagggcctggggctttcctgttcactgttctggggaagatcacaagatattccggctgataagaagaatgctccggctccttcctgttatcccccgcctgcctaatttccttgttgcagggctatataagcccagtctgaaccccaataaagagaagccttgacaatgcatagacagactctggtcctctttcttttgcgccacttggcttccttccttctcccgcccatgactctttttcaggcagcccccctccggaaccctgaatgactgacccgagggacgggacatccatctttctttaacaggcacttcctataatcacatctgcatatttaactgtgtgctcatatcacttgatgtggtactgaaacaatcactgccaggagacagaaaaacggaatagaagttgttaccaaaggagacagccatagaggatgtgtcagaattatactacagagaagtgtgcattatcctctgtatctatcagcagtggttctttcctgagggccattgttgacataaagaaaataaggcacggaaagtgttttattgattgcagttggaatgatggcgccattttgcagaagagacaaaatggtgttacttaatagtaaggtctagggcatggtagttagggaaacaaagtgaatttggtcttcagagaattttgataatggtaatcagaacacaaaatcattacaagccaaagtcagcggtatgggggaagacataataatctctctctctctctctctctctctctctctcctcctcctcctcctccttctcctgctatccctcccttccatgacatttatacctacatgccaaatgcagacaatttcttgttgttcagtactgagacattgtatgttgccagctagttttaggatgagtccttctcttgtgtccagttggcttatatgagtactcatatcatttcaaagacaatgacttttcttatgaattgaaatagaaagtgttttcctcaaatgtccacacattaccttgggaaatacacataacataggtttccatataccaactccaaaaggcccacagatggaatcaacatgttttctatggggttccaggtgaaaaacacatgaagctcttattgagaaatcaccaagaacgtcaaggtaatgataagaaagtgaaagggccttataagaacaggttccatgccaccatatatgccacatgtccagaaatctgaaaagcagcaaaagatggcctgatggtttggagaatattgggaaaaaagacaagtatttgaaagcccatctaagctgcataataaatggggctgttggagcaaaaggtcatactatgtggtggttacattcctggccacacccagtaattttgtctggcatttctaactgatgatggctttggtagctgacataacctcatgattaagaaataattcagagcaaagtttcagagcaagtctctgaagtgcctgcctcctggataaccatatcaagtacaaaactttaactagtcaaatgattttcaattatagaaatcaatacataaagtattttaatcgacaagttaatgttaattcatatttactaaaattgatttttcttgccaagatggggatagagagacctgcagaaacagtggacatgacctcctgatagaatggagactgtagtcataaacctggggaaacagatttggaccaaaccaaagcctctgaatgtgggtactggcttggagcccaagacagtctatgactcctataacagcggagccagtctttatctctagagcacaaatggactttgggagcccattccctatggagggatactattgcagcccagatacagcaaggagggtctagaccttcccacaaacaatgacagtctttgaagatccatagtagagggcctcactatccctggggaggagtcagagggtgggttgggtgaggaatatgggaggatgggatgggtatgtaaatatgagtaattaaaaataataaaaaattgattttccttgtcatgtcagtcaacttaaaataacagaaattttctcactatatataatttcatatatatttatatatcaacatgtgtatgtatttatattgatatgcatatattctgagtctgtattaagatttctgcaggttatggttgttttgtccttatcataaagaaccactgtccattctcccagctcaggaatgaatctaattttagtaatgtttatggatcggacgaataaaataagcatttgtcttccaatttacaatatttcctctatggttccaacattttagatagtttccccactacatttgagaaaatcattacaaaatccatgattttcaaagacttctgtagcacagatctttcttaattccaaattaatattgcttttgaactgcatttggttatgttcataaattcatttgaatttgctatactggcttctgtttaccaaggaaatattcagacaggattttctttattaattctgtctagagatgttgacaaattcacatttgtttatctgccacccctctgtattactcttcaccctgtctgcaatgaaattatcattctttggtaagttttttgttttgattttggtgtatgacttggtagtcatttacatgtaatgtaagctgataaaaaaaaaaccagcaagagcaaaattctatttcaaaatataataaatatcttacatttaaaccaaaaaaataattttaaaacttgggaaaaaatgtgagatattcttagagatgaaaaaacttaaaatggctgaacttccatcttttcagagagccaaaggattgttgggtgtgaagtaacacaatattttttctccaactttcccgtcctctatgtaaatctgtgagttttaaggcagggaacagaggctggagagatggctcagaggctgaacatcatgctttggaaaaggacctaaatttgctgttcagctcctgagaagaacagtacacctcctgtaacaccagccacaggggacctctgcagccactgcacttaataaagggcacaaagtcacaagcaaatataaccaaacatataattaaaaatctttaagaaaatttaaaatctttaagaaaaaaataaaggaaggaaagaagggagggagggagcatgaaagtaggaaggaaggaagacaaaaataggaaggaaggagggaatccattttcaggtgacaagtggctctgtgtttagaggaaaaattaaaatggaaagaatttactaagaaataaggagagatgactcagtgcttcagagcactggttgcccttctagaggacttgggttcaattcctaggatctacatggtagcccataactgtctgcaactccagttccaggagatgtatcaccgtcactcagacatacatgcaggcaaaacaccactgcacataaaagaaaataatttaaaaaaagaaatatttttctgtgactagatatgtaagtctatgtgaatataataattctcatttcttaagtataaattattcatcatttgttagatgatattctaagtttatacagtttacatattttaaagaaatagtataatgtttaaagcagtcatcaaagctattattttcccacatggcatccaataaataataatgtggaagaaagctgaaaaattgggaaatttatatacacgatattcaagaatactaggaattgggaactatctacttgatcaaacttacttaacaacaaaactgtactgtcttgatatgtaagatagatacagaaatgggattaagtacaattagaagtttagaaaattgctttataatattgtgctattcaaagaatacagaaagtgttaaatttatatgcttagttttttattcagctgtggttcaatgtactatcaaccttgtgtgtccctacattgtgctggggacacatcaataacacacagcctctgatccccaagaggttacactaaagtcctaagagaaaaatcttcaaaacaaatgaataaagcaaaatatgtccttcgttcttctcatagaagctctacttcttactacagccatgattttttattttttccacaattttatttaaattaaaagcaagcttgtttcacatctcaatcccagttccctctttatccctcctctcatgtccccatcacccctctatcccattcccttgctgcaccccagggagtgtaaggccttccatggggatcttaaaaatctgttatatcatttggaaaaggacctagcccctcccccatgtttctaggctgagagaatatcactctatgtgaagagggctcccaaagtccattcgtgtactatggataaatactgactcactaccagaggccccatagattgcccagaccttgtcactgacacccacgttcaggggcctcatttggtcctatgctggtttcccaggtatcagtctgtggtccaggagcttccccttgttcaggtcagctgttactgtggttttctccagcctggtcaaactgctgaggggtggccccacatatagtgagctctgccctgtcacatcaattaacaatcaagaaaatgcctcacaggccatttcctcaattgagtacccttttgtccaagtgaccttggttgttggacacatgataattcttgctataaataagtacataagtcctgtcaatcacataatatttatacctgaatctgtctttttttcaattattagttttgttatttggtgtactttcctctctttgttttcttaaacaagtgtcatgaatcccagactagccatgaactccttttgaaattcacaaagtccttgaactcctgatctcactgcctctaactccaaggggagccctttgcctgtctccacccatttcgtttattcaatttcataatacatccacacaaaatgtaatttttgatcatatgcaaatatacacaaatatacacaatgatcttcaaataattttttaaaatgaagggaaacaaataatgggtagtagaaattaataatgggtaaaaaacacatatgtgctctgaagtattattcttgtttgattctgccttgtgtcataacaactttgtgttacattgttacatgtcctgctacagcaaacttctttaatcattattcttaccatagtgcctggaaggctttatcatataaagtagattcttaataaatatttattggtgttgcatacacaacttttttattttcctatagtcctccaaatctgatgctttgcatattcaattatcctgaacataaatccttttgcaaacatatttctgaagaaaatatccaaacatcagcactattctcaatatttccaagtttattattgtgacagaaaatacaagtgtttagtataaaaaggctgagtaatttaatagcagctgcacatttcctgtgcatggaagttgagagtaacataaatctgcctattttcagaatgcaatgcattgggaatgatgtatagttccacagatattgttcctatgtctgtcacccacagaagtccagtgtatacaaattcctcacagatatgactaaggacccttttgctccaattcagtatctatcataannnnnnnnnnnnnnnnnnnnnnnnnnnnnnnnnnnnnnnnnngtgatggccttcaagattcacagtccccttcaaatgactgaaacaggagttctaaagggttttcctcactgtgggactacacagtgtgtctcattaggctacctatagtgcatcagttgcagaaaagcctgacagatctaaaatgtcactacaatcacttttaccaagtgctgtcacccatgttttgtcagcttttagttttgtggaaagaaatgtggaaaggccataaaggttgttcttaatgggaacaagcaatttagtctcagctctaaaataaggattttgttcaattatgtggtcatcttgacagaaattcaccctagtgagcactgtatttattaagataaaggtcatctcatctccatgctcccacctgctcaatggcagttacagaatgtacctatttatcaagcttgctcttggaaaagatgtgtgtatattttaatgaacaagtgtgagttcagatactcaaaagcaggcaagtttataattgatttaatattttgtgtgtttggtttagaattggaggcacaaaagtgcaagattgctttctcttgcttgagtgagaaatgaatcaaaggacactcaggtggtggattcagctggtgtaaagcaaaatattagcagtgacacatggttgatggttatgacaacaggtcagcctgctaatactgaaccccagacccagaagacttgctatccttgtactttggtgtttgggacagtttctgaaaatctgagtttagggcaatatcagcaaagagatgggggcacagttcaggtaataacaaataagtatataaataaataaataaataaataaataaataaataaataaaactattgacttaacatacacatctacttttttctttgccaaatatcaaaatgtttcctaacctgagaaaaatgagaaccatgtgttagggatagtcaagtagggggtccacaagtgcatattctttgttataataatcacattgagaataatggaaaacattactttcatttctaaagcatttcaaccaaattttttttgaatttgtaaaataaaatgcacaatactctttcaaaaataatggtttaatgactagtaatttacttattccacagcaaagactaatttaacatgtgtacaatcaaattaatttgtcacaaatatcctagggtgagtgtactaaaaatgaaggaattgaggcacaaggacattgagttagtgtgctgatcaccacatagagtagagcagcaatgcctgcatctaaaactaacccatgcatctctgatacctgctgtgccacacacttgatctccagtggtagcctgctgcaagtgctggccatgcttactactgccatattttataagatgatggcctcctttcatacaggcattctgcatgctcacttgtttaagcatatcatctgcaataaactatagacaacctccactgctcactatccctttgaagaactgaaatgaatatttcaaaataagaagtatagctgtcaatgacaacatactacactgagatggagtctggatagctggctgcttctcacacttatagccttatggcactgatgctgtatacaactacctggagaccttcagccagttagttctctagtcacttgcttattatttcattacaaaatatttgcatgaaattgccaaagaatgttatacccaaaatatgcatcagtgaggtacctactggtgaattaagaccagctctatactttgggtttaattctctctctccttttgagtatgtttctatctccctcacttcatgtgtttatatatgtgtgtatttgtgtatgtatatgtatgcatgttttcatctatatgagtgcataaggaatgagcttgtgtgcatgatcacatgtgtgtgtgcccttgaatgtggtgatcagacgtagatattgaggatatttatttgctgcttctccatcacatttttttgtcacaggtgtcttactgaacctggagctcactgatttaataggatctggactataagcctcaaggatctacctatcttggcctccccaggattggaattgcagtccatagtcaagcttagtgggtttttcttatttatctgatcttttatttatacatttattcatatacttaaattgtcattatgagtgtgtgcatgtgtgcatgcatgactgaggcatagcaggaaagcgaaccagaggataacttgtaggtattagttctctccttctaccatgtaggcatcagggatcaaagtcattttgtcagtcttggcagcaaattccttgaaccactgagtcatcctgctggtccaagcctagctcttcacatgtgttctaggaatgaacacatgtctacatgctcatgcttgggtcacaacaacttttctggcttcagcatttcattgctttctttctgaccattttcattgtctacttaagtctatatataacagttgttaggctgtatcataagttacacctattcatgaaattgagattcacatgtatatgctccacaataccaagatgtaagtcactcaaaaaaagaaagagagatttcatcctgaattcaacattttttaaaactttatacatggtaaggcacctacatcccctattccacatctaattctgtccatgttcctccaagttcctcacaactccataggaatacctaggcagggttttgtccccagagaaaactaactctctctttttcagcaactattgaccaccagtggtttttatgtagggaggaggtcttgtggagtttctctctccactctagcatcccagctgctatcgtcatcatgcagggcgtgttcaggcagccatataagactttatgaattctatttatcttggccatagagcagtgtttcatagctggtatccataatctctgttcagacaatatcccttaacctctctttctcaattttttctgagccttcctgtggcattgtattgcaggtttaacaaatggtcatttatttaataacctatggtagccttttttttttttacatatggatcagtaaaggatctctataatcatccccatgttgttgcaaaaggaagtttctttgagaaggggttgatcaggttggaccagtgccacatcaccattttaactgtctagtctatcacctgtgttaagtttcatatttccattagtcagtgctcttttagcaatgttgcaaatcatgtcattagtaaaattttacccagaaaaggaaaactttgtggttttctataacttggtcaaattatattgagactagatagcacagacctaatcggaaggaagttttacctatgggagcacccggatggtactccctgggaatattcctctgtgagtgcctttcaccaggaactcacctgggttacacaactcagtttaattattgcaatgtgaacactcaaagtcaattaataggggagactttgtcattttttttttacatttattaacgaaagaccaaaagctctttaaaaggaaaactgtcacctttatttagtcaggaacacacaattccaacttctttctgggaaaggtcaaccgagacatttcataatagaagcatctcaaagttatcacatttctcctttaaatttgattatatcatgttgagtgctaacatctcaacttacacactgaatagttctggcctctaactctaaaataaagtctttcagaaacatagctctcctatcaggtgtttttaaatgatcctggaaagagctcattcctcctatttgaggctgaggctttattcttcatccatctggatgaacagcttcatccactaaactgcagcaggcattaagagatacctttgttgtttcttttgacatgcttctgtcaaggagatggaaagggattcatggcagagagctcccacccactgtgacacattgaagagcaagaacactggggagctgcttaaattgcttctgtgtctctttagcccacactgtttcctgaaagaaaaccccccacctttctctggcctgtaatggaggctgctgtgttgggtagaaacttcatttgagggctctaagaactagttcagtcttactgagttcagtttcagttaaatgtgacagatgcagtgagatgcaacatttgaaatgtacaacaaaaccaatcctggatacacttctgcttcaatatttacccaaaatctcatacacttacaggcatccatatattccaggggtgactttgggtttaaagagttagaaattttcaactagtccttgaaatatatatgtcaaattttaaatgtatgttttcaagaatgtgtatatactatgcacaaatgtgtagactcaaatatgccataatatttcttccatttcctcttagtttaatgtctattggaaaaaagaaaacatacttttctaccatattaatatctattgaattatgttcacatgatcagtgtaatacctgggattttcctcacttcccattgatgtatttttaagcaatttctacgattatttattaatgatttctaagattattttttaatgatttctgttttcttgatataatattgtctgttttaaatatatttagaaattgccacactttgaaatgtctttcctgtgtatgccattatagaacctgtcattagaattatagaacttctttgagctttattttaatcaaacatttgcatcatttttgcttattttatttgattttagaagagattcattttttaaaaaatgtctttgacatcatttaacccagcaaatgttgaaataagcaattttagtgtttaaggctctaaagtgattcagatgtaaacatacctagattagtttgtgatgaaaggaaagaaaccctttctagctactctggataaatccaggacagactatacttgaagggaccaaataaagacagctgtagaatacaattctgctctctgcataggctgtgaatgtaaccttcaagtcctttagctgttgaatgatgacaacaggttagtaagattcagagtaagaagggagtataatcttccagcttttgttcttcacagggcttgaatcaattaaagtttggtgtcatcatactcctgttaactaacaaaatctccaggaaatgtataattctttacgaagaaaaaaataattattattaactgcaaattaaattactatttctgttttttaaatttatttacttttaaagtctctgtctaaatctctgcctgtcacacactctctctcttcctgtgtgtgtgtgtgtgtgtgtgtgtgtgtgtgtgtgtgtacagccatacttggccagaaaaggtcattggattctctgaatctggagatacagatagttgtaaaatatttgatgagggtgttgggaactaaactctgtacctgagtcttccacaggaaaagcaaagagacatctcttcatcccctagttctgtttcataataaattataagtgtgaagctttctaatggccattactttctctcttacttcctccacaactctctccaatatacacttattcttgcaactcttcttcccttcgtttttttcatatatcaatataatatttatttctgccaattcatattatcaattttatctgttatgaccaagaaatttgattgtcctcagacaggcaaagactactaggggaagactctcacctccaaatcttcaaccaagcaacataagccccatgactggcctggaactgggaaacctatagagaaagggacttgaaattcattacattctcacagatagcttggacttcacatatctctacagttgttattaaatctgacacatccagggctattttcatgttttacagattaggaagtggaagttagtgtggttaaataagtttgtgtgatgctcaaatcagtggtaaaaattgaacataagaccaaatttatcaccaaataaatcaaaccacaagaacaatagtatactataatacaatagtctctactcacatgttaacaactttgtatagtaagattagaaaccacacattgtgctttttaacatattggtgactatatatttaatatgattagctttatcataatgtagctccttgggtcacatatatttaatgctttttatatatgcacttactttagaagtttaaatgcattgaaaagagaaatttagagcaggcacaaactagactttatggattcaaatatgagtaaaattaaaaaatgtgtaaaattaattctcttaaataaccagatatctcatgcctatttcctatcaagccaggtcccactgacctttgtgacctctgttgtaacaaaggcccctttgaaatctcacaaacactgactcccattgtttagtaggagaaaaattgaaactctagttactcttctaaaagaaaagtcttaaatgaacttaataataattattgtcaaatgaaaatgccatggaacacatgaaaaaccttgtctcttacttaattctctataaataacaagatatcttatgcctattctcctatcaagccaggtcccactggcatttgtgatctctgttgttgtaacaaaggcctctttgaaatctcacaaacactgactcccattgttcagtaggaaaaaaattggaactctagttactcttctttagtattttatatattattagctaacactttagtaaatatctgaaagttatatggatattttaaatgtttaaataacccaaagtgctcctcattcaaacaccaaggctgttgcatgtgaaatttgtaaggattgaaaacaatggcacttatagatatttgtaccatattttcttgaaagaaaaaattatatatatacttggcaataatcctagaagccaggcttctatatagtattgcagcatttgaaatataaagcctttctaaaagtatattgtggcctccaaaattaaacatgagaaggcaaaaatgaattgtaaaataaagataaaagcgacactaaaacaaattgaaatttattccatacaatttctcaatttcattttgttttgattttccagacagggtttttctggaactcaatttttatacaaggatagatttgaacttgcagagatcgacctgtctctgcctgccatgtcctgagataaaacatgccaccatgtctggctgcaatttctaaatttgatatgtgagtaaaaataatagaaagcataggtagaaataaaccaacatatggaagaaggtaaagatttttttattgcttcacattcaagacatgctaagtgaaggtattcaagaccagaaacaattgagcttacaaaactgggcccccaaaagaagagacaatgttaaacatatgtgaaaattatcaggaaaaataaaaaaggctaattgagtacctgacaaaagtactgaagagtgaaccaattctaaaccaagacagtgattatagttattaataccagcaataccaacaaaaacaacaaagcattagctttggattgggtggaattaggttaaaaatatgaatgaatcaaataaatatcacagagtaagtgatgctcatcaaattattttaaaaaactcagatctggaactgagtagaaagctgaatcataggactgtttttatcttcaaggatgaggatgcaagtagttctccaagcactcaactgaaatcttggccctgaaacaggagctgagaaggcagaaactataggacacctggggatcccttcctagccaagctagatggatgtctatgaggttcaggcacagacaaggaattcctgtctccacaaaaaagagggagctattaaggtgacctttggtctcttcattcatatgcacattagtgcccatatattagacaagaacaaaagagaggaaaggaaggagggaaggaaggaaggaagaaaagaaggaaggaaggaaggaaggaaggaagaaggaagctgttaattcccttgtaggtcaagtctaataatacagatttcaatatctagcaatgaaaggatgggttccctgaaaggtagtgttgagtcagattgggacaaggtgtctgcctcaggttacataacagtctcattttacttattgtgaacttcaggacaacaataaaatattattaccacagttgtgaatttcattgccatccctatacccttcatggctactaccattaagaaaagacacaattttattccccctttattaaacattgattattttctcatataacataccctgattattcttttccctacttctattcccccaagtttctttctacctcctcccacctttggatttgcttccttttctatctctcattagaaaggaatagactcctaaaaggtaagaagacaacataacaattataacaatttaaaacaaaataattagataaaagttgcataagaaaaaccaacagaaagctaaacccaagaggaagcacaagaaccagaaagccactggtttacacactcaggagttccataaaggcactaaattgaatggtataatatatatgcagaggaccttgtgaagacccgtgaagaccctacctgtgtttgttgcttcagtctccgtgagttcatgtgagctgtgctgagttgtttcagaagaccttgttctcctggtgttctttataccctctgtctccccaattccttcttctttggggctgtctgagctctcatgcagaggtatttgatggacatatttgatttagagctgcatgttccgaggaaagggtcactttctaaatttctaactgtgtagagatcttaactctggaacaagtcagggtttctacaggtagcttgtaggtaaccatgtgaacatattatcacagtattcaaagtccttgttctgaaacagggacaagaggaacacattggaggaggccaaggctacataaagaacaggctcttggtaatgttgtgcttcccaccttctacatagagcatgagacaaatagacagatacctcgcttgtatgttggtatgaaggtagatgattcacagtaagtgtcaacagttgactgaatgttgtcttcttgccaccacttcatgattcatgaaatccatagcttcccttatagcccatgtaacattcttctcttcacttggtctatgaactttgaacacaatctgaaggatggtcttcatatagtctatgtacaatgacttacgtcttcttgctatttagataaacaaaaattaaattagcactttcgcaaacaattcattctacaatcttttttagatgccagaatttatcatttcctatcatcacactcggcaccctgatttttggtgatcttttccctggtaatgttaactcaccaccaacttctttgcttgtaacattgttttttcagaatattacaaatattatcactgactgtcatttattcaatggctaatatccacatataagtgaatacacaccatatttatttttcagtgactagattacctcacaaggatgtattttttttcctagtgccatccatttgcctaattttttttataataatattttcaacagctgagtgaattgtataaatgtatggttttcccctgttttttgttggaggaatcatggttatttctaattttgagttgttatgaccatatcataaatgaatgttagtaggggaagctgtagccatgcctacttaggggctggctacaggtgtgcctgaccacatttgcgagggcgaggtcaggggatgcaggttgactgtgttttctatttcggattatcttttggggcttgcatacagaccgctgccacgccagctggctaggtcgctctgtaagtaaggcttttccctattaaatacccttgtatttctacttgactctgtcttggtaatttgccactatatctggttgtcaggaacggaatattggaaacctaaacccgatttgggacaggctgtgggtttcattgggcctgaggcctaggcacagaaagtgccctctctccacaggcgtttccagctagcagccgacccactgcagctgagctgctcagaaccatccacccggctcggagatagtttttagctgcctagagtggaggtaggcctcggctttcagcagaggaaagccgcatctctttcagtggttgctgtcacaagaccatatactctctaagataagcgcagccacttttgtgacctctctccaccgttgacctactgctgccaaatgcctcggaataaatgaacacctgggccacccactggtcaaagatagttactgcatctggagtagaaatcaggtaaaattatggcggaatatttatcatttgctaaaattgttaatatttttgcttattatgtgaattcactgtttgaggaggatactaatctgccaattaccggcctatatgccgtaatggcagttagcttgctggtacnnnnnnnnnnnnnnnnnnnnnnnnnnnnnnnnnnnnnnnnnnnnnnnnnnnnnnnnnnnnnnnnnnnnnnnnnnnnnnnnnnnnnnnnnnnnnnnnnnnnnnnnnnnnnnnnnnnnnnnnnnnnnnnnnnnnnnnnnnnctgcagcaagtggaacagaaattggatgacaagcttggcactgtgtccaatacgctaaagacagagctgtctgttactcaagatgagatgtagtgtatttataccatgtctgagaccttagaggctaggctgtcagaagaccgtgatgagctaaaaaatatctgtagccagctagaaactcagataggcaatgttacccagaaattagatgcaaagatgcaagatacccaagatagggttgaagaattagacaatgccattcaatcaattattgaagcatccaaggtagcagatcagaaatttgagtctagatttgaatgtttggaagataatttacagtatagggctgggacagattacataggtccatatggtcgattgctgaggactctaaatcagcaaatcatgacctcgaatctagactccaatacctagaaggcagtttccatgccatccagatgctgcctaaggatgatcgtattaaagacctagaaaaacatgtaaatgagcagttagagcaatttacagattcactaacatgcttggaatcttttatgattaaggagattgaaacttttcaaaagaatatcattactacgcttaaagatcattgggtgcctcagaagcagaatcataccaatcccaggaacctactccacccaggtatcatgactattctaaggttgttactcgtacaccattagtgtacccagctatcatggtagaaaagcccgcttctaagaaacaccctcatgggcagatggcttatgaatggcaacctatacagctgaaggatcttaagaatattaaagaatcaggtgtctcatatggtctccatagcccatacgtaaaacagctattacattcatgggcaacctttaacagggtgacaccacagattgggaacaattggtagcagctgtacttgagaattcatgccaaatccagtggaaggcattggtaagggaagaggcaaagctccttgaacgtcagggcataaaggaaggttttgaagcccctctagataagcttcttggtcagggtatttatgctgacccacaggttcaggctgaatatgatgacgatatactgtctctttgcaggaaatatgaatatgaatatgcaggaaagcagcattaaatggctgggataaggttcgtgagccaggagaacgtctagaagcttataccagaatagaacagggacctacagaacagttccaggacttcttacaaaggttaactagggcagtagaattacaggtaacagatccagaaacaagacaatcaattatatatacaatagcttatgaaaatgcaaaccctatatgcaaaagaatacttttgcctttaaagatcagatcagctccgttagaagaatgggttttgtatgcagccaacattgactataatgtgcaagatactggagcttgggtaggagaagccatctccaaaggtttaaaacggcaacaggaaattaaaaggtctagaggtgaggatgtaagggcttggcaaggagaagcaccttacagaggtcaacatagataccaagaggctagaggttactactactatgaaccagaaccttgggtaggaagagccttcccctggagaccacgaaggctccaggaacctagatgtttcaactgtggtaaaatgggacatactaagagaaattgtagacaaatgaattctaacaatgcctcatatggaaggccactgccttctggattgtgtagaagatgtggtaagggcagacaccgtagaagatttgataagggcaggcactggaccaatgaatgtagatcgaccacggatatacaggaaaaccccttaaggttgggaaaccctgagggggtctcaagaagtcccccacatcgagaaaggtcgggtcattcccagtaacagtgggagacagtctctcacaagaacaatagatagttcattgcctattgtgaaaaatgatactgctctagannnnnnnnnnnnnnnnnnnnnnnnnnnnnnnnnnnnnnnnnnnnnnnnnnnnnnnnnnnnnnnnnnnnnnnnnnnnnnnnnnnnnnnnnnnnnnnnnnnnnnnnnnnnnnnnnnnnnnnnnnnnnnnnnnnnnnnnnnnnnnnnnnnnnnnnnnnnnnnnnnnnnnnnnnnnnnnnnnnnnnnnnnnnnnnnnnnnnnnnnnnnnnnnnnnnnnnnnnnnnnnnnnnnnnnnnnnnnnnnnnnnnnnnnnnnnnnnnnnnnnnnnnnnnnnnnnnnnnnnnnnnnntactcggtgatctgcattggactggaaggacagaaagggatactgaaaccatacgtggcagatatagctataaatctttggggtcatgatctcttacagcaatggaatactcagatcaatattcctccactgtcagatacaaattatgtacaatctttagatagtagagaagatctggtaagatgctttggaaaaccgttaccaaccatccatgctgtatagaaattaggtacaaatgttggaccttcagaggagccaaaggccctgctattgaagtggctaacagatgaactagtttgggtaggaaaatggcctatgacctctgagaagctagaggctttagaaaagttagtacaggaacagctagacgctggacatatagaggaatctaccagtccttggaattctcctgtatttgttatcaaagataagtcaagaaagtggagaatgctgacagacctaagagccataaataaggtaattcaaccaatgggctctttgcaacctggaatgccattaacttgcttaatacctaaaggatggcctatcatagtcattgatctaaaagactgtttcttcacaataccgttacaggaaaatgatagagaaaaatttgtatttactgtaccaactctgaataattcacagacagttaggagatatcagtggagagttttgccacaaggaatgctaaatagtcatcctatgtgtcagcactttgtacagcaacctttggaaataattcataagaaattttcacaaactcttgtttatcattacatggatgatattcttttatcagattctaataaggaaactttggaacgtatgcttgaaatggtgaaggaagttctgcctcgttgggggttacagattgtgccagaaaagatacaaagaggagattctattaactatttaggttacaagatagacttacagagaatcagactctggtctaggtgtttgaagtgaaagggaaaaaatcctacaaaggtttcctctcacagactttacattctaatggtgaggtacaagcagacaggaaataagagaaataaatagtatatttgaaaatgatggaagactaggggtaaaaggaaggcatgggatggatacaaaggaaatggtacaggctacactggaggcaaagaagtcctctggggtaggccattgagagagtcgtgttacatattgagactgcagaatttgttcctgataatacagatttaacttctctattcttacaattacaggaaactatcataaacagaagtaatcctatatatattacacatatcagattccatatgggtctgcctagcccactagcacaaggcaatgatgagattgatcatttattaattggaagtgtgctagaagcctcagaatttcataagaaacatcatgtaaatagcaaatgtttgaaaaaggacttctctatcacttggcaacaagccaaggagatagtgaaaaagtgtcctacttgttccttttataatcaaactccattgacagcaggctgtgatcctaagagcattcagagtaatgaggtttggcagattgatgtattccactttgcagagtttggaaatttgaaatatgtgcatcatactatagacacattctcagggttccaatgggctactgctcttaactctgagaaagctgattctgttattacacacctgctagaggtgatggcagttatggggggtataaatgcacaaataaaaactgacaatgctccagcatatgtctctacaaaattggaacaatttttcaaatattttaacataaagcatgttactggtataccacacaatcctacaggacaagcagtggttgagagatctaatagaacacttaaggagatgctcaacaaacaagcttggaagactaacccccccaaacataggttgcataatgctttattaacactaaactttcttaatgccaatgaaaaaggacaaacagctgcagaaagacactggactacggagaaaactgctgaactcaatcagcttgtatacttcaaagatgtactaacttctgaatggaaaccaggacatgtgttacataggggttggggttttgctttggtttccacaggagaagaaaaactttggatgccatcaaagttaatcaagattcgagtgaaaaggaaaaaactctcgaggaggacaaatgacagatattctactaaggtatatcttataaactgaatagaaacctggcaaaggaaagggaagtattttgcttttatcttcacaggaaaactcatctccagaaggcaactgacactccggccagaggttcaggtactgacttcaatcaagttgaggatttcaagggagatcttcaatcaattgaatcccatctaacatggactggatacaattcattcaagactttcactatactaacattttcttcctacaggaccccacatgactatcatcgtcccatttcagcannnnnnnnnnnnnnnnnnnnnnnnnnnnnnnnnnnnnnnnnnnnnnnnnnnnnnnnnnnnnnnnnnnnnnnnnnnnnnnnnnnnnnnnnnnnntttatggttgggattggaaggaggtgttcaggcttggacacctctttcagatgactttagggtttagttaaaatagatagttaggatgtgacataagcagatcttcttatattttacctttatgattgttaattttggatactttacactgttaagttttaatcctcttttagacaaaaaggggaatggtgggggaagctgtagccatgcctacttaggggctggctacaggtgtgcctgaccacgctttcgaggtcatggtcaggggatgtagggtgactgggttttctctttcggtttctcttttggggcttgcatacagaccactgccacgccggctggttaggtcactctgtaagtaaggcttttccctattaaatacccttatatttctacctgactacatattgttaatttcccactataaatgttattgagcaagtgtcctttggtacgatggagtatcctttttatatatacccaagattggaacagctaggtcttgtgtgagatcaatttccaattttctgaggtaccactatatttatatacttaatggatgcacaaatttgcactaccataaacaatagaggagtgttcctcttgttccacatccttgaacattcatttgtgttattgatcataggcaggatctgacaggagttagatggaatcacaaagtagtcttgatctccatttctatgatgattaaggatgctggacatttctttcaatgtttgtggcagcttgaatagtaatggccctcaaagactcatgtgtttggatgcttggcccatggagagtggcactattaggaggtatggccttgttggtgtaggtatggctttgtcttgtcagtggaagtgtgccattgtggagacaggttttgtgatctcaaatatgctcaagctatgtctaatgtggcagtctccttctgttgcctgtagatcaagaagcaaaaccctaagctccttatccagcaccatatctgccttcacatcactgtgtaccaccatcatgatattggactaatcctctaagtgtttgtcaaccacaattaaatgttttcttttgtaagagttgccatggtcatggcatctcttcacagcaatagaaaccctgactaaggcagtccatcacagccacttgagtttactcttttgagtattctctgtttaaaccttcgccccatttttaaattgtattatttttttgcttttgtttttgttttgctattttgatatctagtttcttgagttctttatatattttagatattagtcttgtattggatgtagagttactaaaactattttaacattctgtagactgccactttgctacagttcatagaccttgagaggttatgtgtacattaagggatgtatgaggcatggatcttgctgggacagagaaacagaatagattttatgggtgaacattgacagggggacaggaacaggaggaaaaggtgtcatggcaagggagatggcattcagagagagaatacagggaaagacagctagaactgaggggcaattgaaggatagtttggaatcctagtgtaatagaaacttcctaaaatatatgaaggcaatcctaatgaagtttgcaaagaatgagcaagaaggaatcccagcttccatctcttgtcaccaaatgaggcttctagtactatgactcacttacatccaattgaactcttgataaaagggctccaaaatgccacagaaatcaggttattgctaaaacaatatgttgctctcacagattgacagaagggctcaattgctgtggacaacctccacacaggtcattgaatatggagaatttatcttggtcctacatagaaactttatccctaagatctagtttttttagtataggaagaaattctgcaaggttcaaaaagagaaatgtaaacaccaagtgacaaactctttgatttacacaggtgtcctgcctgctagttatgctaggtcaatggttgcaaaaagcttgttgtggtagtaactgaccaatgtctaatttgaattaaggcccactccctgaaatgaaagtcatatttgctacaggttgatgatcatgaaccagagactagatggcccagaaacctagagtaaaataaaataatactagtcatcaaatggttcggggaaatgataaaattactactgatgatgcaatggtgttctactatactcatagatcagagccctgttcaaccagcatcagagaaagttcctcctgctgctgctgagaaccaatacagagctgtacccagacattatgcagaaagagttactttgaacccacagcccaaatgggatatctccatgaaatctctcccttaagagctcaaggagtcctacagaagaggaataagaaagagtatgagagcaagagacaagggaaaacaccaggagaaaaactaaaacaactctaaaacaattgtgcatagttcataagaactcactgtgattaaagcagtaaacacagggatgacatgggtcctctacgtatatactatatctttattttagtatttttatgggtttcctgggtgtgtgaacaagtgggtttatgattcttttgccatctcttgggctcctttctttctgttggttcgctttgtcaaatttcaatataatggtttttgatttaatccttttacattttgttttgttgttatttcttagaagcctattttttcctaatgagagaaagtaagtgaatatgggtggttcaggaggtatagaagaactgggaagaacagaagaaggggaatatgtaatcaggaaatattgtatgagaaatgaacctaatttcaagaaaggtggaagaaaaacaaatataattactaactacctccatgaaagctttcctgaatacacagatggcatatgcacatacacactctcaaagacatatacactgtcacagacacacacacacacacacacacacacacacacacacacacgctcgcctaaaacaagcactgtatttctcatcctctctcctgtgtcttgtcaatcaccaagggggaaagtcttattgctcttttctttctgtgaagcaggtatttgccaaaagagtgacacttttctttttatagttgagatttccacttgaacttcaggccaaaattgacaatatacattcttcacagccttacatataatgcagtacattacagtctttgaataatgtttgatgatttaggaaaaagaaaatattattttctatatagttatggaaatatctctccagtaaaatacattcacattctctagattggatgtcatcttttcatcatttttattcccttaactattcagattgtcaataaaagtcaactgtattgaattgaattcattgtcaatgctatttacctaacacccataggataaagaggcttgcaatgtatgatcatcttacttatatcatttaccacatacagggactttgtaataaatgctgctaatgtgacttttaaggaaataaataggtacaagtacacaagagatacattacactatacaatagatgcacaatactgaaagtgttatcttatacagacatatggaagcctcagagccaaatagaattgtcttttcattattcttggctataaataaaaagaacacacaataaaacttttaacagtatttttaaacactcacatattaagacaaagttgtatattaattactataatatcactcactgtattgcagaaatattaagtcttaaaaacattttagggacttataaattagattcagtccccagatcccatatggtaggagacagcaaagtactgcagattgtactctgacctccacacgtactcagtagcacaaatgcacacagatatgcaggagtgcacatacacacacacacacacacacacacacacacacacacacacacacaaatacacaatcagtcacaaaataaataagaaacaaagctttctcctctattattctgttttccatcaggcattggaaattactgtcaacagcaatgtaagagactcaagtgacggacttacaatcgaatcatcttcgatcttaactctattttcctgaatacatgatggcattggtttcaaaggagccatggattatctctgcaaaaacaatatctgttaaatattttaatgatacttatttctatacttttaatttattttctggttttctgtccttttgacttcctttatttttattattagaaacatcatagcagctagcaaatttattttttctttttttgttttgtctttatttaagatagactttttaataacattgtatggagacaccctagccccgcccaatagtcctgggacaggtaacaggtggacccgggactcgcccataagggcgtggtgaaggaaagccggggtgacataagagagcttcttaaggggctgcacatggggaccttgaccccttttgttctggctgcgctggctgggttctataacctagctctggcctgtgttttaccttggtgttttctggaataaagagaccttaatcctacacttggcgcccaacggaatttcacgaccctgaaaagccaacgggcacccaggagaatcagtgaattccttccgccccacgagggcattccctcacccgccctctctgcccctgggcccggtgcggcgctcgcgccgctgggacttctgattcccacggcggtatttccacaccactgcataagtccagcgtgcccatccacccgcttgcggccggactcctctgcttcccgtgggcgccggggcacgctgcggctcagctgcgaaaagcagctgtatgattcccaccgcgtgagagctggccgcccgcaggagacccagcctggctttgtctggccctctggctacctgggagaattctcccgggcactcactttaactagctacgtgtgtgcgcttagggcctgaacgcagagctccggcgcacacagcagagggttttcagctttcatccacagggaaaacacccgcttcatgctgctactattccccctgttcccgcatgcctgtctacacctgctgctgccttctgcggccagaccctggcagggtaagcctttcaactctagccctgggcacagccacttgcctgacgcaggtaagttctaaatatttccttagcggcaaaagcagatttctgtgagtcagatcctaccttagatagacgctgtgccacctgctggccggcatgtggttactacaaccagaaatgaaattaccaataaatatggctgcatttcctttgcagttagatatgtataacatatcttatgcttacatgcattcactgctggaggagcaggctgacttgcaaaatattggcttgtatgttttgttagctgtgactttcttgattcacttgtcgttgttcctcaagaacagaaggaagtttgatctctctacccacttgcaggatatacaagccttacgtagccaggctcaaaatgaatcaaaacttacctattcggtctagaaaatcttacatgagaattgtcgaagcaaatcacggattctgcatcacaccttgaatcccttatggtggatgagattaaagcctctcgtgaggaaattctgacccggctgacatatcttgaataagaagacactgactcactccgatccgagatgcacaattcgagaaggtatttcaatcaccctaaagcggttacacacacacctttagtatacccggccatggtggtggacaggcaaccatctaaaaaacactcccaggggcagacagcatatacatggcagccaacccaattaaaagatcttaggcatattaaggaatcggttgtttcgtatggtcttcataggccatatgtaaaacagctattgcattcatgggccacctttaacagggtgacgcccgcagattggataggattagcatcagctctcctcgataattcctgcttaattgaatggagagcattgttcagggaggaaggaggactcctagaacggtaagccgccaaggacggggttgatgcacccctccaaaaaatcctaggagaaggtatttattctgatccacagattcaggctgaatatgacgaccataccctgtccctatgcagaacagcagcatcaaatgcatgggacaaggttcgtgaatcaggagaacaactagaagcttttacaaaaatagaacagggacaaacagaaccatttaaagatttcttagacagattgaccagagcagtagacaaacaggtaacagatccaacaataagacatccaattgtgtatagtttagcttatcacagtgcaaacccaatgtgcaaaagaatacttttgcctctaaagatcagatcagctccactagaagaatgggttttgcatactgcccatattgactgtaacatacaagatactaaaatctgggcagaagaagctgtcccaagaggtttcaacaaacaacaggagattagaagagatagtaacagaaggacttgggaaggaagagcaccttacaggggctcacacaggtaccgtgaggccagtgctcatcgccaccttgacccagagcctcgcataggaagagcacgctctggaagtccatggaggcgtcaggagaatagatgtttcagctgtggtaagataggacatacaaggaaaaattgtagacagagaaattcacgcgacaggtcgttgccctctggattatgtaggagatgtggtaagggcaaacactggactaatgaatgcagatcaactagggattttcagggaaaattattggcgccgggaaactcggaaagggcccattattggcaccgggtaactcggaaaggggtctcgagcaggcccctgccccgagaacagttcgatcattcccagtaacagtggaagacaatctctcacaggacaaatagataattccttgcctatggtggaaaatgatattgctctagagggtagtttaaatagtgatgaagaatcacatgtgactaatgaaaatgacaaacgcgtattttggcaagcttctattaatgataaaaggcctcagttacaaattaaaattcacaataaagttatgtctggtttggtggacactggagctgatgtgactattatcactcagaaatgttggcctaagaattggccacttaaagaggccaatgtacaatttttaggaattggaactctatctagagttcgacggagtgttaactcgatggtttgtattggaccggaaggacaaaaaggaatattgaaactttacgtagcagatattgaaataaatttatggggtcgtgatttattacagcagtggaattctcaaattaacatccctccagtgtcagatacgaattctagacaatcgcgggatagtagaaaagatcgggtaagatgccatggaaaatggttaccaactatccgggctgtacagacattaaatacaaatgacaggcctttagaggaaccaaaggccctgccattaaaatggcttacacgtaaacaatttccacaatctcttgtttatcattatatggatgatattcttttagcagattctaatgaggaaactttagaacgtatgtttactatggtgaaggaggttctgcctagatggggtttacaaattgccccagaaaagatacaaagaggagattctattaactatttaggatataagatagacttacaaagaatcagacctcaaaaggtacaaattagaagggaccgttatcaaactcttaacagtcttcagaagctactaggagaaatatctcaattacagacgatcattggtgtggagggacatgacttaaagcatttaaaaatggcactaaaaggtgataaggacttaaacagtcctagaatattatcggctgaggcagaaaaagacctacaatgggtagaaaacagaatattggatgcacatgtagatcggataaaccttgatctagactgcattctggtcatcttgccatccagagaatacccttctgggattctgatgcagagggaagacactatattggaatggatattcttgccacataagcagaacaaaaagttaaagacgtatatagaaaagatttctgatttgattttaaagggcaaattaagacttcgtcagttgactgggaaagacccagcagagattatagtacccttaactaatgatgagatttcctccctatggaaggataatgaatattggcaaatagctttcaccgactttttgggaacaattagtaacaactatcccaaaaccgacagaattaaattcataaaaaagacggtttggattcttccacgcattgtaagacaaactcccatttctggagttcttaccttctacactgatgctaacaaaacaggtaaggctggttataaagcaggtgaggtaagtaaagtagttcaaagtccatatacatctgtacagaaagcagaattatatgcaattcttatggtgctcatggattttacagaacctcttaatatagttactgattcccaatatgcagaaagagtcgtcttgcacatagagactgcagaatttgtccctgataacactgaactaacctcgttgttcttgcagttacaggaaacaatcagaaacagaagtaacccactgtacattacgcatatcagatcccatacaggtctgccaggcccactggcacaaggcaatgatgagatcgatcgtttattgattggcactgtgctagaagcctcggaatttcataaaaagcatcatgtaaatagcaggggtttaaagaaggacttctccatcacttggcaacaagccaaggagatagtgagaaactgtcctacttgttccttttataaccaaactccactgccagcgggatgtaatcctaaaggccttcggaggaatgagatctggcaaatggatgtttttcactttacagaatttggaaatttgaaatatgtgcatcataccattgacacattctcaggtttccaatgggctactgctctcaactctgaaaaggctgattccgttattacacacctactggaggtgatggcagttatgggcataccggcgcagataaaaactgacaatgctccagcatatgtctccacaaaaatggaacagtttttcaaatattataacattaagcatgtcacaggtataccacacaaccctacaggacaagcagtcgtcgaaaggtctaacaggacacttaaggagatgctccataggcaagctggtaagtcaaaacctggcaatgtgctagaagcctgggaatttcataaaaagcatcatgtaaatagtaagggtttaaaaaagggcttctccatcacttggcaacaagccaaggagatagtgagaaactgtcctacttgttccttttaaaaccaaactccactgccagcaggatgtaatcctaaaggccttcggaggaatgagatctggcaaatggatgtttttcactttacagaatttggaaatttgaaatatgtgcatcatcccattgacacattctcaggtttccaatgggctactgctctcaactctgaaaaggctgattccgttattacacacctactggaggtgatggcagttataggcataccggctcagataaaaactgacaatgctccagcatatgtctccacaaaaatggaacagtttttcaaatattataacattaagcatgtcacaggtataccacacaaccctacaggacaagcagtcgtcgaaaggtctaacaggacacttaaggagatgctccataggcaagctggtaagtcaaaaccccccaaacataggttacataatgccttattaacgctaaactttcttaatgccaatgacagtgggcagacagctgcggaaagacactggactacggaaaaaacagctgaactgaaccaaccagtgtattacaaagatgtgctgacctcggtatggaaacctggacatgtattacgttggggtaggggttttgcatttgtctccacaggagaagaaaatctttggataccatcaaaattgatcaagattcgagttgaaggagacaaccccctcgacaaggatgactgacaggtattttctgaggaactgccctctataagtcaaaggacattacatgtatggatactcaaggaaagaacgtagctataaccatcgaacaaaaggaacgtgatatacggtaaaaatttacagctgtctctcgaataactctatgtctattcatttcctggtccctattcaactaaatcgagactggatttagagttgggtttggctttcctactctaaaatccaagtatgttatttaacaacatttaaaagtttctgtgttatatcaagaagccaattgctataatacagaataaataagaataagaggactatctttgtttttcttggcttttcttttacaccctctcagaatcgttgttagtcaaggttcatggctgggttctataacctaactctggcctgtgttttaccttggtgttttctggaataaagagaccttaatcctacataacataaaacaaaagctaacacattgggataggacaaaccaagaaaaagggaggaaagaaactatgagaaggcataagagacagatgtaggtacagacacccacatgattgcatcctaaggaatgccataaaaacaaaactggaagccataacacatatacaaataacctgtaggataaaaaagaaaagaaaataaatgaataaatacaaaataaatactcaaataaattaaaaactaaaaatgaatgatccaggctacactgtatataaatatttttcccataaacaatttccatttcttggcaaaataaatctgtactttcatgtgttttctattggcacataagtaataaacttttccatatattttcttcttatatattcttctctcataatatataccctgaccacaacatctcctccttccattaccacccttcctcccctcttccctccctttaccctcagaacagagcaggcctcccagagatataaaatgaacaaggcttaacaagaagcaataagactatgtacaaccttcatatcaagtctagatgaggtaacccagtcttgggaaaaggaaaatgtgaaccaagagcaggcaaaaatttcagagaaagccccactcccactgtttggagtcccacaaaaacccaaaactaaacaaacacagcacaacctagcacagacccatataggctctgtgatggctgttccagtctctgtgtgccactggatcactgatcagttgattctgtaggccttgtctttgtggcatccttgacagctctggctctctcaagcttacccccattgcttctgtggggttccctattaggggccttggaagtatacagcagatgacaactagtgttcagaagtcaacccaccaaagcagtgattctctgttggaggaagatcctatctgggaaaggactgtgggatccctgactgtggaaactattactcctatcttagtttcacatgtgctttagtgtatccccaaaccctgctttgtagtgggtaatctattgtgatgtatatatgtaatcttttgattacacctgtgtcttgtaggcacgtatatatataaatggtcaggaagatgacttctcatgaagctgtatgattttgatatatagaaaatatactaggatatgcttcataactagatctattgtttcacaaggactgtaagtcttaaaagcctgctttcttccttttcatcatactaatatcagaaaacaacaatttcctctcagtctaagacaagtgcacacaaattgctcatttttacctcagaccaagttcaaactaaaataaatgtttttttgtaaatgaatcagaattcaaaactttacaattatgcacaaggtcatagtctcaggtgtctaacgaagattattaacacagagaagcaacaaaacttcatgtcaatttctcacttgcctagtccagctgataaaaaaaaattatagctcacagcttgtctcattaggccctgttcccccatcatctggacacagtcttacaccagtttcttaaaccttgaaactttgtgttgccatttaccatgttacagtgactcttataatttttttttaatgttttaatcctcttggaaaagatgttttttttaaagtaggtgaacattgaagcagaggaaattgaagcaaaggagaactagaaagaattagaacttagaagaaaattaaaggacaataaaataggcaaaagaataaagcacatgactcagcatgtgtgttccatattctgtaacccctcagattagaaatattctaagttcctttcactatgctgtggcttcttacttgaaccctggaggtagtgttgggaactggactcataagttaccattagttatcaagctctgcataatgttctggtggctgtatcggctcccatcacctgctggaggaagactctctgatgacaactgggctaagcactgatctataaatatcacagaatatcactaggaatcatttgtttgatttttgccatttatgtcagtcatgattggttctaccctaggtttctgggccttccagctcctagttcctgacaatccaggcagttttaagtatgggatccattttgtggcttgggcttcaagttagatcaggtatcacttggccactcccacaaattctgagccatcaatgaccaacacagtttgcagctaggacaggttgtgggtctaaggttgtgatacatggttggtgtcccatatccaccacagaaagcctcacctgttacagatgatggcttgtttaggctccatagcctgcattactaggcatcttccctaggtctccctcatagatttgaggaagtttccattgcaaatggtttccacattgcttcttaaataccctgtattttagtcatctctccccatacactctccctccatcacttcctccttcaactgatctcttctgttaccatccccaccttccctcaaaccacctacaaaaacctattctatttacccttcccaggaagagataggtgtcccccctagatccctccttgttacccagggtctctgagtatatggactgtagcattacttaactgctaatatcctcttatatactgtttgtatttctgttctgggttgcttcacttggcatttttttttctagttccatcaattttcctgcaaattccatgatgtcatattttcttttctttttctttcttttttttttttttttttggttttttttcgagacaggttttctctatgtagttttggagcctattctgacactcgctctggagaccaggctggcctcaaactcacagagatccgcctgcctcagcctcctaagtgctgggtgatgtcatattttctaacaactgaataataatactccattgggtaaatgtccattctttggtggtagagatgatacctgaaatagcctacccatgtaaacagattgatgaatatcccaactatcattatagagtcctaatccagtaattgatgagagatcacagagatacacaaccaagaaccaggctgtagtcagggaatccagtcaaagagagggaagagggaacagatatatgagcaagggaggtgaaactcatgatggagaagtctacatagataactgaaccaagcttacagaaacacataacaacagatttaccactttggaggctccacaggatagaaattgtcccttcatattcaggagatatctgtgaagcttggtctatcagagggtcccctggctgtaggaccaggatacaaatatagtacatgagccagctttttggagctcattgcatatgatgggatgccatgatcagtcttaatgcatgggaaaggggcctggcccctgctccaacctattgtgccagactttgttgattcctcatgatagcccctaacagtgaggagcagtggacgaggggtgtcttaggggtacggtgaaggggtggtgggaggtggtgagggggttgggaggagaagtgggatacagaactatggttagaatgtaaaatgaagtttaaaaagcacaaaaaaatataagtagcctggaagagcagctcttaaggttattcctagggtttgaagaatatcttcacagcatcctgaaactgaatttaaagggtttttgttgttgttgttgtttttatctgaagggtatgcagtaaatgcaccaatgagctgttcaggtcatattctttatttttctgtctattcttctgtcctttaatttccctagtgtgagatttctctttaaacctataattgcttgctctattatggaatctctttacttgctctcctctattcttcccctgactcaatcttcctgttccttcatgtcctcctctcctatcctcttctctccttctctttctcataactccctctctcctcccccatgctcccaattggctgaggagatcttgtccctttcctcttctctagtggaccatataagtctctcttaaggttctccttgtttcctagcttctctggcagtgtgaattgtaggctggtaatcctttactctatgtctcaaatccatatatgagtgagtattagtgacttggttacttcactaggatgctttcttctagatccatcaatttgcatgtgaactacaagattccactgttttattttctgctgagtagtaatccattgtgtagattacaacattttctttatccattcttcagttgaggggcatctagattacttccaggttctggcttctataaacagagttgaacagatatccttgttgtatgcatgtgcatcttactatgttgatcctgcctatacaagaacatgggagatctttccattttctggtatcttctttaatttctttctttagagactcaaaattcttacggtacaagtatttcattttttggttagtgatgtttctctgatttctttctcgaacaatgtgtcattggtaaatagtagggctactgattttttttgagttaatcttgtatccatcagctgtaggagttccctggaagagttttttgggtcaattatgtagtctatcatatcatctgcaaatagtgagagtttgacttcttcatttccaatttgtattcccttgatctccttttgttgtcttattgctcttggaaaacttgccaaaagcaatctacagattcaatgcaatccccatcaaaatcactattaacccacaacctacaaacatctggtttttgacaaacaatccaaatatatatgctggaacaaagagaacatcttcaaaaaatgctgctggcataactggatgcaaacatgtagaaaactacagatagacacaagcctttcaccctgcacaaaacttaagtcaaaatggataaaacacctcaaaataaacccagccacactgaacatattagaagataaagtgggaaatacccttgaactaattgatacatgtgaccacttcctgaacataacaccagtagcacagacactgagatcaacaattaataaatgggacctaatgaaactgagaagcctctgtaaggcaaaggacacagtcaacaaaataaaacagcagcccacagactgggaaaagatattcaccaaccccacatggaagagataggtgtcccccctagatccctccttgttacccagggtctctgagtatatggactgtagcattacttaactgctaatatcctcttatatactgtttgtatttctgttctgggttgcttcacttggcatttttttttctagttccatcaattttcctgcaaattccatgatgtcatattttcttttctttttctttcttttttttttttttttttggttttttttcgagacaggttttctctatgtagttttggagcctattctgacactcgccataggatgtggagaaagggaaacatttctccactgctagtgggagtgccaacttgtacagccactttggaaatcagtatggcaattcctccagaaaatgggaatcagtctaccacaagattcagcaattccactcataggcatatacccaaaagaagcacattcatacaacaaagacatctgttcaatgatgttcatagcagcactatttgtaatagccagaaactggaaagcagcctacatgcccatcaacagaagaatggatagagaaattgtggtacatttacacaatggagtactactcagcagaaaaaaaaacaatgtaatcttgaaatttgcaggaaaatggatggaactcaaagaaaccatgaaaccattctgagcgagataacccaatcacaaaaaaacaaacatgatatgtactcactcatatgtggattttagacatagagtaagggattgtcagcctacaatccacactgccagagaaactagtaaacaaggaggaccctaaaagagacaaactttgtaccctggagaaggggaaagggtcaagatcccctgagcaaattgataacatggcaagagggtggagggagctacgagaatgagaagggaagaaaaggaagaatgcagaggtcatgagggagcagaaaggttgagtcaggtgtggattagaagaaaggatatgtgattggtagagttttagttgtgggggtggtaggggaggaagggatggagaagggaattagtattgtcatgtaattcaatcttttgacagaatttaaaagaacagtaataaactttatatggaaaaaaagaaccaagatagccaaaacaacactgttcaataaaggaacttccagaggcatcaccattcatgacttcaagcttgattatagagctgtagtcctgaaaacagcttggtattggaacaaaaatacaggtactaatggaatcaaactgaaaaccctgatattaacccacacacctctgaacacctgatttttggcaaagaagctaaaattcttcaatggaaaaaagaaagcatcttcaacaaattgtgctggcataactggatgctagtgtgtagaagattacagataggtccatatctattgccatgcacaaaacatatgtccaaatgaatgaaagacctccacataaatccagccacactgaacctcttcaaagagaaaataggtggtgtacttgagtgaatttgtactggagaccacttcctgaacataatactagtaaaacagtcattaagatacacaattaataaatgggacctcctgaaactgagaagcttctataaggcaaaggatatagtcaacaagacaaaatggcagtccacagattgggaagacatattcaccaaccccacatctgtcagagggcttatttgcaaaatatacaaagaactcaagaagctagacaccaaaacaccaaataatccaattaaaatgtgatgtacagatgtataaatagataatctcaatagatgaatctaaaatggctaaaagacccttaagaaagtgctcaactggactaggaggcatctggtgagtcactcctactcaggtgcaaacctggccactggctcccttgcatgagtactcttccttaataaactacctgttaacaatctatttctgactccaatttgtaaacctctaaaaagaaaaaaagtgttcaacaacattaaaccactggggaaatgcaaatcaaaccaactctgagataacacattgttcctgtgagaatggctaaaataaaaaacaactatgacagtttatgctggagacaatgtggagaaaggggaacactccaccactgttggtgggaatgcaaactcatacagccactttggaaatcagtatggcagttcctggggaaattgggagtcagttaaccacaatatccagttattccactcttaggcatatccccaaaagaagcacattcatacaacaatgacatgtgttcaactctgctcatagcagcattatttgtaatagccagaacctgaaagaaaactagatgtccctcaactgaagaacggatggcgaaaatgtggtatatttatacaatggagtgctattcagcagaaaaaaccacaggaatcatgaaattcgaaggcaaattgatggaactagaagaaaccatcctgagtgaggtaacctagtcaactggtatccagttgcagagagggaggagtgatgagcaaatgggtcagaaacagactggagaaacccacagggacagctgacctgaagaagggggagctcatggaatccagactgataactgggagtccagtataggactgttccacaccccttgaacatggatgccagtttggaggtctgtttaatctatggtggctctggtagtggatcaatatacatccctagtacacaaatggactttgggaccccattccacatggagggatactctctctgcctagacacaagggggaggttctagaccctgctccaaatgatatgacagactttgaagttcctcctccttgaaggcctcaccctcttttgggagcatataggggatgcaatagggggttggtggagacaggggaggaggggagggagagggaactgagattgacatgtaaaacaagcttgtttctaatttgaattaaaaagcaaaaataaacatttatacttatatgtggatacaatgtatgtttataatcatatttgttggagatatgccaaatgcatgcaaatgtcagaacacttattcaaaagttctgcagtgaaatactgtgaatataccttcattcttgccagagagatctattcacaaaataatgttggaattcagtgtgcataaacccactcttaggggagagcaaatgcaaatgaggtaaaataagtttgtccttgttcttggtgtttcttagaagcaaatgaattagagtgaaatatgaaaggacaaagcactataaatagcaattaaagagcaaatccttttgagtcaatttaaagaacagaacttgattctgacacttcctaactgtacagaagcagttgccaataacatagctttttgacttctttactttactttcctacaatctagaaataaacagttttccttaaacacaattaggtaatgtatgcaatgcaaaacaaaatcttgattttctataaacattctaaagattcttgacatttcttagacttttccatgaaaaataaagtgggaatggatgaaagggaaacatcaaatggtttgttttctcacacacaggaccggagatccctcaccttgaagaaaaatgtcatgcttcaagcaaatgtgctgggtactgtgcactcctttgttaatgaagtaaaatccattttgatctctagacttttaagcaaaataactttacctgggattcaagagagtaaagttccacttacagcagagttttattatgatcctcactcaaactttacagcagaatgcatgaaagacagttctctgctactctctgaaagggaagaagctggatagcatttctttgggttctgtttacactgcatggtgaaccagccagttcgccatggtcccttagggagcaactgatgggaattagcatcctctgctaaaattagaacacaatcccatctaaaggaggtctgtcattcagaaaacaatgttggtgtattggacacatttgtgattttatgagacccccacatttcacttaagggtcaacaagaaacttcatagtgtactggggcacttgcaggaatcacctggaggtgtgcacctcaaatcatttaaaaaatcgccacatttaaggaaatgtcacagtgtaatggggcacttgcaggactcacctgaagtgtgcacctcagatcatttaaaggaaagcagtgtgttttgtcactgatgcaattatgaacaggagcaaatatttagaatggcattacccagatatagatttagaaaacaaacaaaaacactgacacctacaagacagtaagccccatggttagctcttggtcacagaaaagatcacactagaattgtaaagatttgtcatccagtcttaatcaaaagactccatcaactatatatttatgtattattgatcccactcacatattgtcaattttagcacattgtgataaaaaattgaagcagggtgatgaattagcaataattcaagttttaaaatgagaatttgtatttttctcaaacaagtgaacaacatagaatagagcacatcaaatgaaatctatcctccatattttgtctcatagtataacagtcttttaccaggactaacacgtgaataaaaaatatccaaacacctgtgaaatgtgactgactataagaagattcagtttaatctactttaaacaaatcaataataatcaaagatcacattgttgcatctaatttaatattatattgattgcaagccttatgactttttaaaataagttaaattttgatacaacaaatgtccttgggaattgaaaaatgataatacataattgaataggctataattgaaggaacatgaaaaatgcttcaaaaatcaataaatacactattcaaaaatagacacaccactataacaatttctaaaatatggatttaaatgaacataatcatatattaatataatattacaaaattattaggaaaatctctaaattctttggaagaggtataaaacctaatagttgtgacataaatgagcagcaggcagttccaaaaggaaggcagtattcaagaaagtttgctagaatgaaaggggcaggaggccaagacgggacttgagatgagtagacagaaacagtacaacacatggacgtctaacatgatggtgccttagaaggaaggtgaggagcttcattatgattgaaaggaagaaagacagagaccatgagaggtggtagggagcatggacagtgttctctcagaggaaatctgtaatatgttgtcacaggcctttctataaagcaagtctgcagagtaaaggataggtttaacatttaatagttgttaggagtgccatgaaatttcacagtatatgatttagttaaaaatattgtgtatggtcaagagcactgaggatccaactattggagctgctgctatgcctctgcacagacagctactatctcccaaagaaagcagcagggaggtgcggtctaattcttgagatctgccctaaagctgcagtcccatgtccagcactggtcacagtcactgagaaggaagcaccaataataacaactgtaggaattgtttctcttctcccctctactttcttcctccctcctcttttctcctcttcctctccttcccctttcttgctccgcaattccttctcccccttttttcttttcttcttttagtacaatgaatgacaagttcacaatatcaggcttactcatgcatattaactacttcacttcccttctggaatctctgttgaattaagcactgtatccctgcagtctaacagatggaatttcacattcttacctctatcacccattagcctaactttttctttgtgttgtttcacttaaactttttatccaattttctcctgcagttaaaccaaaaagaaataataccacctgatacataaggtatcctgagaactagttcttttgaaatgtgaaaagttttaaatacatagaacatggttgacccaaaatgacctcagaacaaagttaactttcattattccttcttcctcaaatacaagaaatatagactatttagaagtattataaatcataacattaaaatctgcagatccaggaatgtccacatttcctatggccctcaaatgcaaactgtttgctagttactaatacagtgctgagtagaagaataagaagtcacttcctactcagccaaggctacttctcttttcatgtctaaatgtatgtacacacattaaacccccaacattttatagcatgatgtatgttttaattgaacaggtaaacctgctgttttagatcaatccagagatactgtgagtaactggatttatgtctactttctttatttctttcataatttctcctatagactcactatttttcaaattaagtgctttagggtttttatgagtctatgaaaatgcacataatatgccagagatatgaatagcctacctcagatcacatagtaagaaatgcactaatattgagcttaggtctggcaattctgaatataatctcagtactattgaactaaactatcttctctaaaggaattactatgcaaaaaccaagtcagtgacttttgggaaatcagggttgtattcgaaaaagatattacatacactgtagtatttgggcacaggaacttttctccttaaatatgaagtagctctcattcacttagtgtaactgacagtgtttgaggggaacctccacctgttgctttagagcatctaattctcttctcccagatgaggctaatgtaagaacaagttgctgtctgtatgtgtttaagcctgtgtgtgtgtgtgtgtgtgtgtgtgtgtgtgtgtgtgtgtgtgtctgttgcattttcctggcaggtaatatagaagtgatactccaaatgaaattccaatatctcaatccaaaattaatgaattaagtaatttacaccttataggaggacaaattcttttatttctaattatttactcagggaggagacatttacaaggggccagcagcacaacttggattttctgttttttcccttatttccttattattcataatctcatattttccttctaaaagccagcatcttgcaggtggggactctaagtaatgggcatttgtagattatttaccttcatggtgaagagctataaaggttcatgaagcatggatcatgaaccactgctttacagtcattggtaaaggccacctattcaaaagaattttgttcatttgccttaaaactttaagttatcaaagttgcattatgaataaaaaacataaaaaggaggggaaaatgtgcaagtttccatgaatgaccatggatgtctctcccagtatggagattattgaccatctttgtaaaagttttaaacgaggggttaaaaaacctccctctattccagaaactttatatttaatttaaaaacataactaaaaaacaagtaaaatactctaaaattctttttatttaaactttccttcctttctttatcatccaaagcatattttttttttttacaaatatctacctatgtttgtattgcatgaaaagtaaaactaagctagcacactgattctttaaggtaaacctgttccagattaattcacctagtgctgagagagaagagttagcaaagcacagcacagcatatccttgtttctaggaaaagtgctaagtactgcagttcccatgtagggataatctctcagtctaggtaaatggaggagggcttaggccctgccccaaatgatgtggcagactttgatgatcccccatggaagaacttaagttccctagggagtagatggggggtgggatgggggagttgttggagggcatgggaggaaaggagggagcagtaactggagttgatatacaaaataagattgtttctaatttaaataaaaatttatataagaatacaagatgcagccctcttcaggctcagtgctggggaaaaccttttgaggtagttcactgtgctgtcttgatttttcccttacttaagtgatagatgtaatatttttaagggatggaaaatagctgatgctgcttcttattcatgtacttaagtccaaacctgcatttgacagaattagaagattaaacaaagatttgagaagtcattaggaataaagacaaagactttttatcaatggaatccatgaacttctaacatggaaatagatataagttagtttcttccactgtgagaccactaagagaggatgctaatgaagggacaaaaatgaagcccctcccccaacaaattactgatcagcacctaggtacttagaatccaaccctctagctctgtaagaattccctaattgcttctgatccattaaatttattttaaaattctacacaaataaatttagacaataacgaatacactcttctcatatgactaaattaatatcaaaagtgccatcctgtattctgaggttggtagcaaatgatatatcactgaatatgaatgggttgtctgactaatttgtgcctcaaacacgttggcatagtaaatagctcaaatactttgtggcacagaatctctgcctctcattcatcttttctatgttagtaaaatcacattatttgaccattttccattttgacttatagaagttactgtaccaaaacaataaacatattgtttgattgtgtctctatagcactgagtattggctatagctcctatcctcagcatgagtaaagaaagtgattagttaattaatttacggaatttctttgtaggaaagccaactagacccatttgggctgacttctgggcccctagtcataaaacactggatagtgtttaattaagtgtggcaacataaccactctcttcatactaacaggatattggccagctttctacctttgttctgaaaatgtacttgacatattattaaaaatataacacgatgcattttatttttttattctggcttactgaggtttagaagaaaaagtaaccagcaagacttaaacatataaataatcaataaacaaagttataatattagttataatggtaaaccatacctatctttcatttggatctaacattggtaagcatctgaaagctgcaattgtacgattacttagatgtacttacaaactaataatctttaagggctgagtgatgttattatctaaacaggtaatgaagttatctgtaagcttgaaaaatgccccctcctttataagcttatgctaaaatgtatttggttgaatatataaatcctcacaatgaattatttgtgaaggaaaatggtacagctggctgactttgaagggaccagctccccattttggcagccataacagccgaacatgcacttgcctgaccttgtcttggtcactaaagtcagatgcctgcccctttcgccagccataacagccaaacacgtgtttgtctgaccttgtcttagtcactgagaggtcagacgactgtctcatggcaagtaaccaatcagaagttagctggtggtgctatgctttaccgttctgggtgtgctttatgcacaagtgcacagcaatgatgcacagagcatagcaaccacccttggagggcttatggcctataacaaccagttgactaatcaacacatggcaaaccctccaagtctggcggcgcaccaatcctgagcctgtgcatacccctggacactccccttatgctttcctacaaggtctctacccagtctcttcgagctgtctttccttgtcatccatcatgatggatggacagaaggcctgagctaacatggggttaatttgttaaacaactataataagcctcatgcagtttgcattgaagggaccaactcccaatttcggcagccataacagtaacacgtgcttgccataactttgccttggtcacttagaggtcagatgcctgcctcgtgacaagaaaccaatcagaatttagctggtggcgctatgctttatgaccctgggtgtactttacggacaagcacacagaaatgacacacagaacatagcaaccaccctgggagggccaatgggccataacaaccggttggccaatcaacacagggcaagccctccaagcctggaggcataccaatcgtgagcctttgcgtacccctaaactctccccttatgctgctctacaagattgctctgcagcaggttaaaactgtcttttgtagccaacaccatgggggtggacaaaagacccgagctaacatggggttagctcattaaattacaataaagcctcatgcaatttgcagcaagctcttgaatctgcctggtgattggggtgaccgaggtcgtggcctgggaccccaaatacctgagttttctgggggtctaacagcatcatgtttctgcctacagatggtgattggggtggccgaggtcctgagctgagatcctggaagcctgagcttctgagggtcttacaacttcaagtgcagtttgttgtcacagttttgtttttgtttatagctgtcaggttactaagtgttgggatgctttgtatcagacaattcagaccctctgagttaatacaaactgcattatcagaaaaggatgttcatcttccttcaggggagattccagagctctggcttaatgaagttctgacaggaggaatttgaggagagaaattaatgaaaagtaagtaaatattttaattaaactgtccaaaaactggacaccaaagacctctgagtccacagaggtccttgcatggtgtgaaattctatgagactaagaaaggatgatctggaagtagatgagggaaaatctcacataggacttggagacactcattctcaccagcaatgtgaaactcttaagcctgtagggtattcatgggaaaccctagaagtccttttccatatgaacactgatattctaattattaactaaaaggcagtctccaccaataaatgcctaacaaacatcagagtacagagaagtaactggaagatgatatacatgactagatgataaggacctttctctatcctcaaggatggcaaacaggcttctcggtgaatcaagatgttcttcaatatggggaaactatctactagggcagagctgaatgttcattaaagaaaaaagaacctcttaaatttacaatatttaaatatataaacctatagtacagctgtaagtttaaaaaacaacaagaaaatttctagactcacccatgtatccaccaataaataaaaatataaggaaaactgaacatctgataaaggtgcaggaatgatgaaataagtagtcaagatcttcaaagtggttgttgggcttccttgtatagtgttgcttagtgtgcatgaagaccttggttaagattccagaagttggaagaaaagctgtgacaatctaaaggaaaaactgagcagagtaagtaaagcaattgaggaagtgctaaatcaagtgttaataatcacacaggcagacaggagctgtttatagacagcaaataccagtagccttgaagatttaatcatagaatccaccttaaaacatagaaggttttaaaaattaggagcctgtctccagcagcctgtccatggtttccagttgtataacttgtgggggaccaaaataattatgctatggaatattttgagatccagccttgggtttccctaaacaggaaaaccagaaagctcgggcccactattgtattgttaatgccagtaaggctactattgtttaccatggcctcagggtaatatgcctcctatttgcatctctgtgggcctaagcatctgaataggcctgcacctgggcagagatgctaggggtgtgagtaacaagggaggacagcagttaagggcaagcgactagaggagaaaggagaacaaggagagaaatggttcccttgtggtaaggaaaggatggttaagagacagcagaaaagaaggttaataaagaaatgactagttctacaacatggaactgaaagctctctcaagatgacaagatgcctgtgtttggtctttatcactgctgggttgctaggagtttccagatccacacactcccactctgactgaacctcatggcttaaggctgagacatgctgggtcacaacaataacttcgatagaattcatgagatgttaacgtatctaagacgggacatgtttaaagaagacctagtgaaaagtttccatgtagtaagttactacagagagcagaatagtgtggaaacatgaagatttgacaaagaagctccataactgattaagcattataataaaatgctatgcaacagctgtttgccatggtacgttgtactgaggaaggggtgtgcaaaatctcccaaaacagccacctaaaaaggctgaaagtgtgccctggaaaccccaattagcatccagcagaaggcctttgtcaaatcacaactgcatgaggaaagcaggctggatatcagcctacaagatgatttgcagggctgacccaagctgagattcaggaactatctcccaagtgactcagtgaagtacttccaaattgagctttccccacattgctgacctgataattgaaattgttgcttggaagtatgaatttttgatatacaaaattggataattagtacaataattaaattttgtaattaaaattttcacacatatggtttcacaacctgtagcctgagatggctttattagcagattccactaacatttaaatacagaaaattctagtcttacagaagtcatgataaggggatttatttctaacttgtgatttacattttaaaaaatgtaaagtttggggctagagaaatggctctgtgttttttgatcttgcaatggccccaggtttggttcccagcacctacatgatagctcacaactgctggccaattccagttagggagatcagttacactattctgtctcctgcagcctaaagaatgctcaagctgcacaaacatgcacatgggcaaatagatgtacaactgttagacccctgcaaaaactcaggtatccggggacccaggccatgactgaggtcaccccaatcaccaggaagattccagagcttgatgcaaactgcatgaagctttattgtttcttaacgagctaaccccatgttagctcaggtctttcacccacctgccatggtggatggctcgataaagacagtttgaactggctgctgagagatcttgtagggcagtgtaaggggagtgtctaggggtacgtacagggtcacgattggtgtgcctccaggtttggagggcttgccctgtgttgattggccaactggttgttatggcccattggccctcccagggtggttgctatgctctgtgcatcattgctgtgtgcttgtctgtaaagtacacccacggtcataaagcatagtgccaccacttaacttctgattggtttcttgtcacaaggcaggcgtctgacctctagcgactaagacaaggtcatagtgagcatgtgttactgtcatggctgccaaaatggggagctggtcccttcacaacttctataatgatttcaatagtgtaatatttttatgaagtatataatttgcctggttataaatagaacgatgcatgatatattagtctgagaaaatattttttttttcaggaaatcagcattgtttgataatttgaaaatcagtgtaaatgaacatattaattgattaaaggagaaaaggaaattatcattatagcttcagaagaaaacaaatggtaagtttagtatccaagaaagaaaacttgccttagcaaattaatattctcccaaattacatacacatatctgttctcattatatatacttaatgggaaaatttatatacaaataatttatttccattttatacaaaaaacagattactatgactattttataattataagatttatatgtatggtatattaatatattatatacaattatatgtacaatatatgtgtatatagtttaaatgtatcaatgatatgtatatgtatacatatgccattgtgggttaagagagatttttagggagtgtacaatagaataaaggtgatatggacaggtaaaggagaataatgcaaggaggtttaaatgataatgtggatggggtaaataggaaagagaaagagatttagaaagggacaattatccctgaagatgttttgaaaaagccacatggaaagctgcacacctctccctggtcctgccttgtctaacatataaagtgacatcttgaattgtcatatgtggaatgaagcaactgttacccataacccaaagtgtccttcttcaagcaggtaactgaagtccttccaggaagacatcagcaagtctgactatcaaatgagagaaggccacagtttgccctggttcctgtgactaatgtaaaaaaggcactgaattcatttctcggttaattctgaaattttcaaggtaaacttgtgaccctcataaaattccctcaatttccccaattttcacaatgaactgacaaggcaaatgagattcaggagatcaaggaaacattgaatgccacacaattgtaaatagccatgaggacacagtcatgctggccacatgagaaaacacccagtggtcagacacttttaatacaggagtccaggtaatacagagagcctggacacacttcagcaaggctgtaaccagatgtatgaaagtgtcaaatactgcattgcccagagtcctatgagaagataagaaaaccactaagttattttatgttagcatggacagacctggaaaacagtgttgaatgaaaatagcaaataaatattaatcctagcattccatgagcatatgagggctttatatatcttctgcaatatactgctgcagtttcttttttcagttcttaaagttttcattgtgcagaatcttcgacttctttggtttgatttgttatgtttttttctttttttttttttaggttactggtaattttattatttactttattagtgaattgatggcaaccaatcaaaagtacctttcaggccacaactcatgttattgtgggaataaagatatgtgataagcagagccattcctttacatgatgtatccctaaaacctgaccagaaattgtgacatcaaataatcactgtaagtagaaagaaactcagtcttccctaccagatgtcactagacagcatcgtagatttgaggaaaacatttaaaaatttgtgtactttaactttctgactacaatggatcagagacttgtatctccatagttttttcttttactttgaaagtcttatttataccattattatgatagtacaaatccctttcaagtttgtccttaattgcaggagaaatctaagtaaattttcagtgcaggcaggtaaccaactatatactccgtttttctctggttatgtaattaacaaatatgtactctagcaatctcacatgatttgcagtgatttttgtatttattgtcttttaaaaactgtacacaaattgaattcagtggatttccaaaaagagaacatgaagttatgtggatgggatacggaggtaaatcgggcagcagtggtataaacattgtataaaactctcagagttagtaaattagaatcactgtcaccctctgaacagctctcacttactattgctcagcggtcttcacttacataatttttatctgatatattagacttcagtttttcatagtgatgcccacagagaatggcatgtgaatctctaagagctacatatgccagatcgtgagtcaataaagtccattgtgccctattaacctccacaggtgacactgattctgagaactcactattttcctttccaacatcatgtatgtttcaggctgcatttgttgtatttaaagtcaacatagagaagcctggatgtaattacaatttttaacttttgttttagcttaaatcctttttagatgctttatttttccttccaattttacattagaacacctgaaagataattggacttgtcctgttggctgagcctcatgtattggcatacacttagttggtataattgctttattcttcacatgtgctgggtacagaatagtaaattgttcttgctacagatgcctctgtgcatgccttccccatgagagctagttgagttccactttctggttaatagtaagacactccaggctctaaaaacctcagtggggccttggttgcacacactcagtgctgaggctgtggaacatttccttcagagcatgctgtagcttccattgccttttgatttactatatgcattcataatcaactaatatttgacctacgattatatgtaaattttattgatttaatgaaacattgttttacaataaagatcagttttgacatatctgactcaatgggtgcaatatatctgaaatcattttggctataagtttttaaattatgttttattttctgaagagggctgcatcttatattcctatataaatttttatttaaattagaaacaatcttattttgtatatcaactccagttactgctccctccttttctcccatgccctccaacaactcccccattccaccccccatccactcccgagggagggtaaggtcttgcgtggggaatcatcaaagtctgccacatcatttggggcagggcctaagccctcctccatttacctagactgagagattatccctccatgggaactgcagtacttagcacttttcctagaaaccaggatatgctgtgctgtgctttgctaactcttctctctcagcactaggtgaattaatctggaacaagtttaccttaaagaatcagtgtgctagcttagctttacttttcatgcaatacaaacataggtagatatttgtaaaaaaaaaaaatatgctttggatgataaagaaaggaaggaaagtttaaataaaaaagaattttagagtattttacttgttttttagttatgtttttaaattaaatataaagtttctggaatagaggaaggttttttaacccctcgtttaaaacttttacaaagatggtcaataatctccatactgggagagacatccatggtcattcatggaaacttgcacattttcccctcctttttatgttttttattcataatgcaactttgataacttaaagttttaaggcaaatgaacaaaattcttttgaataggtggcctttactatatttaaggagaaaagttcctgtgcccaaatactacattgtaggtaatatctttttcgaatacaaccctgatttcccaaaagtcactggcttggtttttgcatagtaattcctttagagaagatagtttagttcaatagtactgagattagattaagaaattttatctcagggaagatgccctttttctctctccaaaaatatatatgaactccaaatgttacattatgttctttataacattaaggaatatttgtttcagtaacatttccttctaaacatactggcttcttagtcatttaaaattacttgtcaggaagcatgctgaaaagcagaaattgaaataaataaacaaaaacacacatttaatgagaagtcaccaagtgccatcattttctcttacatctttaattgaaccacctaaattaattggtttttctgtttgcaattaattccataaccacacaatctactgttgttttttgaaacataaatttttattttcttgttactatttaatttccttaaaacatattacaatattatagttagttatacatatttggcttatttctttgctcatcaagactctattgtgtgcttaatatataggagacattgcacaattttgattgtgcagtaattagaaagcaaacattcttcttgcctgcaaaatgtttatacttgggtgacagaaggaataaagtggcattgctgaaatgcagactgattttctcttcctctttccatgggatgagatcccattttccatgacttatatcactgatgggttgaggaacaagatgggcaactttgaggtggtctcttgctttctagaattttttctttccatttttagtttaaataccaaaagcagtcctgtaatttcttcttttataaggaatatgttttgcaggaaccatccatgttaaagaaggatataatatctgacttcactcatagctgtgtgatcagttttgtaaaaagttaggaagagaatgaagcatgcccatttgtccacagatcaaagtctccttcaccatctaggctttatcagcaaaaacactggctttttaaaacatctctctatctcttcgtcttaactttaatcaagtctctcttatggatcgactcagtagaatactcaaccataggatttaataaatcttaaaaattagaatttatagaaactactgaaaagaaagcattaggagtaatagtcactaaatattttctaaagaggaaaagtcatacatggcctacatgacaccatgtgtaaacgttcactaatgagaaggttgtctttgtcctttgaagcacacacgtattagataaataaatgtaaagcttttaaggataaaaacactctgggcaaggcacacccccaagaaaacattctacaatacatgagtaactgagatggagttcagactgatctacaaggcaccttagcatctgttttatatctgtagaagggtatggcagagcaaagtagccaaaaagctaacatttgtacaagagcattcattgatattgggaacatggagtcttacatctgaatgtaaccatgcctgggtattggtttggacacccaggaatggctcctaaaaccagcagcaataaaagatgcagcctgaatttatggctgcagatcagagattttcagatatttccagtgagtctgtaactgggacctacactggagaggtagtatagatacaaggcagtgtgaaacaaagatgaggtaaagtaagaagacagattcccaatatggacattaagataattgcatacttaagtattttaagaatgagtaaatgcatccaatgacactccaaggctttttgagttgcattagataaagcatatactttatagcaagattgaaaaatgcaccgaagtttaaaaatccagtaaagttgagagtgaaattcagagatgagctggctggatcttttctcttgtgatcagtaatttcttttggacaatgagaacataggtggcctgagcatttgttctatggagggcattcaggtttaataatgagaagggactgtagattaacttgaaatacaggtccctataggtagacaaacattttggccctattcctaagaagctttattacctattttaatacacttatttggaatatttcttgaaaataatttttttccttgtagactgtcttttcagtggttcagtcaattgtgttgatatatttgactctcagacagcaaaacacattaataaggtcttaactgccctttaattcttagtagatggaaacatgaggcaaaactgtggatatagtaatcatgtttataaagaaaaggagaaggnnnnnnnnnnnnnnggaaagagtttaaggaagtagagaccaggcaaaaaaaaaaaaagaaagaaagaaaaaaacccaaaccaacaacaacaaaaataaccaaaattccaacatgtgtatctggtagaggttagggagatatttccatggatataaacaaactacacaaaaatacatcaggaaatcaatggaaaggaaactgacaaagaccagaggttgagatttttaaataatgcaagagatcaaattctttggagattcaacattcttttgatggtgaaacactaacatcattgtatagtgggaaattaccaatacggagtcaggtagaaatataaggatatttaatagggaaaagccttacctacagagcaacctagccagccggcgtggtagaggtctgtacagcaagcagcaaagagaaagcaaaagagcaaacgcagtcacactacgtcactctgaccacaccctcacaagcctgatcaggcacacctgtagccagcccctaagaaggcgtggctacagcttcccctacatcattggtcaccttaaccagagtcatttaaatatagtaaaaggaagcaatctgaattaatggtgttcgtaaatttaaatatacataatgaaagctttctcttccccccttgcctcatgtagagcaagtgaaagtgtttagaacatgtactccaaataaaaggtgtttcaaaacatcctcttgatattccaagtagtcacaaccacacaaacagtgaatgggaggctatggaagagaagacagcatgcacagcacatattgtaatgcaagtaattatgtgtcgttgtaaaggaaaagtggcattgaataaattaattctattatttgtgaattgataaatatttctcaatatttccaccttaactttggctttaaagaaaaaagtactgaggttgtatgtctaatagacttgttcccaagcaatatgagagacacttgtttttaagaaacattgaattggaccagtaagatgtcttataatgagtaacagtgctggataacctgagttcaaatcccagaattcccacttaatgcattgtcaagtgggcacctgtatttatacacacatactcaataaaaaataacaagatgtatataaaatgcatagaataaggaaaggtgggattgaaatggttggtaattgtgcataatatatcactcatcctaaatatatttaccatgtaaaatatgtattgactatatgctgctagcacttttaatattagaaatattacatgatatttctcattagcttatataactactgttcaaaatgctcagaataaatttattaatctctaaaagaatttgtttgtcatgtatgcatatagtttacataatttctgaaattactcattttctcagtagatcattctaaagctcaaaatttaaagggaaatgtttaatttgttgtatgaccacacttacattttaagtaacctatttgcatagaaatttgttcatcataaagcagtttcaaacaaatttagccattaatctcatggtattctgaaaccatgggtagcaattttaacatttttggaagaccaataggctggtcaattgcatttaaggaacttgtcaagctttctttggcaatcaatattgaagccaatattggacatctggtctcctagctaaacagagtacagtataattacatagaaatatgatgtgcccaactaatttttatatttcaattaggattgtttattttttaaaaagctgataaaattataaatgatctcatctaagcaagaatttggaatataaattcagtaatgttcctttttataagtgcttattcataatttgaaacaatggtctttcaaaatgtaaaaattcaaatatcagcatcactaaaaccacaccataaatcctttgatgaaaatccattaagcttagaaagaagtctaaattctttaatgtgatctaaattccttatttactatttttcctttttattgaaaatagattgttttctcaaacaatataccctaattacattttctcctccttccactcctccaagttcctccccatttctcctctgctctagatccattcactttctgtctctcattaaaaagtataggctcccaaaagacaataaccaaacttgacagaataaaacacaaagagataaaccaaaaactatcacaatgaagctgatcacaacccaaccagaagaaaagagtcccaagagcaaacacaagagtcacagatccacttgttctcacaattaagattcccataaaacactaagctaataactataataaatatacagaggacctggtgtagaactatgtaggccctgtgcttgctgcttcagtttctgtgaggtcttgcttagttgattcagagagtctttttctgctggtgttctccataccctctgactcttaccatctttctgcttcctcttccatggaattccttgtgctcttaggggaaggatttgatggataactccaatttagattctcataatatctgtcagtgagtctgtgcatctgttcccatctgctgctgaggaagtctctctgaagatgactggataaggcagtgatacatgagtataacagaatatcattaggattaattttattgatactattttaaaaaacaatatcagttgtatgttttactgtaggcctctgggatatctagactctggttcttggttgctcaagcagtgtcaggtacagattccttcttgtggagtaggtcttaaatcaaatcaaacattggttgattactcctacacgtctgtgacaccattgccttgacatattttgtaggcaggacagattgtaggtcaaaagttttttgtttttgttttttgggtttttgttttgttttgtttgggggggctggataggtatccatgtttctcttgtggtaacccatagaatattttctagcaccaaagagactaaaacataggggtaaaacctccatgtaggcattatttcaacccctgcatgttaaatgagttgtgtgagtcttatcctcagcaatgggccacaatgccagatttctgaaagcaatcttttgttttatcaacagcctggttgttaggggattttcaagagccctcaagcaaacaactcatctgaatgtagcccagttcctctaccagaaccctagcctgccaacaatagttggtttgttgagactccataacccccattacgaggtgtcctattaggatcaccttcattgattccatgaagtttacattgaaatagtgttcccacacactcactcaagggcacccaattccaactgtgtgttctggcactctctttaccccatatttcactatctgatacctgattcccactcccattctctcccactctatccataaaactattgtatttccccatcttagagagatccaggcacactccaccctgaaagttattctttaccatacctctctctatctatgattgtcagttgattgtcgcctacttaatggctaatatctatttataattgagtacataccatacttatctttctgggtttgggttaccttacacaggatgataattttctactttcatccatctgtcttcaaatttcaaattcattatcttaatagctcagtaatctgttgtgtaattattctacattgtctatatccattcttctattgaagaacatcaaggttgattccagtctcaggctactatgaataaatacacaatgaacatggttgagcaagtgtctttgggtatgttggagtatcctttggttaaatgcttaagagtggcacagctaggtcttgatgtagattagttcacaactttctgaggaaatgccatatttaatttcatagtgaatccacaaatttgcaatcccaccagcaatggagaagtattccccttgctccaaattcttactagcatgaggtgtcacttgtgttattgatttaacaatcctgacaggtgtaaaatagaattacaaaacagttttgattgacatttccctgacagtaaggatgttgaatatttcttttaagtgttcctcgccatttaagattcctctggtgagaattctctatttagatccataccccgatatttagttgaattatttggtttgttgatacctattttgttgtgttctttataaatttttggtattaggcatcgttcagatatggagttggtaaaaatcttttccattctgtaggctgccagtgtcctttgccttacagaagcttctcagtttcatgaggtcttatttattatttgctcatcttagtgtctgtgatatcatttttctgttcaggaagtaatctgtgccattgaattcaaggctaactttccccattttctcatctatcatgtttagtgtatgctgataccatcctgtgtttattattatagctctgtggtatagcttgaaattgagaatagtgagatctccagtagtaattttaatgttcattattggtttaactatcattttttatatgaagttgaaaattgtcttttataaagatctgtaaagaattttatttcaattttcatgaggattgcattgaatctatagattgctttagttaaaatggtcattttactgtgataatcctacccatccatgagcatggaagatctttccatcttcttatatcttcttcaatttatttttcaaagacttgaagttttgtcatacaagtcttccacgtgcttggttagagctaggccaaagtatattttattatttgaagctattttgaaaggctttacattcctaacttctcaatccatttctcaattgtatatgggagggatactaaatcatttttagttaatcttgtatctagttacatgctgaatgtgtttattatatataggactttcctggtggggattttagggtaacttatcacatcatctccaaataatgatacactgacttctttccaatttgtttcctcttgctctcttgaagttgtcttattcttttcccaaaacttcaagtactatattgaataaatatggtgacagtacctggtcttgttcctgattctagtggaattgctttgagtttctctccatttaatttgatgttgactaccaggtagttgtaaatttcctttattgtgttaaggtatttattttttttttgtattcataaactattcaggacctttatcatgaatggttatttcattttgtcaaagacctttcctatatttagtgagatgataaaaatgtctacttttctttcaattagtttatatggtggattgcattgaatgacttttgtttattgaggcatccttgaatttctgatataaagccaagatgatcttggtggatgatcgttttgatttgttctgggaattggtttacaagtattttatgcagtatttttatacctatattcatgagggaagttgatgtataattctatttcttgttagtttttttgtggtttaagtatcagcttaacttgtgcctcaaaacataaatttttcagtgtacattctgtatctactttgttgaataatttgaagagtactagtgttaagtcttctttgtaattctggtggaactctgtgctaaaaccatcttgtctggactgtttttagatgggagacctttaatgaacaacctcttatttactagtgtttgtaatactatttgcattgcttatctgaaggtgatttaactttggaaaatgttacctatgaagaaaattattcattttcttagattttccaatttggtaaagtgaaggttcttcaattatatctttatgattctgtggatttcttctttgttatatccagtttttatttctgattttattaatttggatattctttatgtttattttagtaagttttggtgagtgtttgtctaccttgttgactttctaaaaaaaaaaaactaaatctttgtttcatttattctttgtattgtttcctttgcttctatttgattgatttcaaccctcaggttgattatttcctattctctactccttctgggtttgatttcctcttttgttctagagctttcaggtgtattgttaagttgctagtatggaatctctccagttgtttttcttttttttttttttcttttgatgtagtcactttgtgctatgaactttcctgtttgcactgctttcattatgtgtcactaatgtgtatatgctatgaattaattatcattgaattttggaaagtccttaatttcctttatctgcccagattcattattcattcaataaagtgttgttcagtttccataagtttgcaagctttctgttgtttatttttaatcgttgatggtatgataggatatagggagttacttcactcttcttttatctcttgagacttgcttgtatctgggtatgtggtctgttttgtaggtttttatataagaatccaagaaaatatattcttttgtgtctggatgaaaagtactgtgactatctgtcaggtgcatttggtttataacaattgttagttccagtattttttattcagattttgtctggataacctgtctgttggtaagatatgggtattgaagtctctcactatcagtatgtgagggtcagtatgtgatttaagctgatacacacacacacacacacacacacacacacacacacacacacacacttgggtctcttgtgtttgaagcatagaatttaagaattgaaataccatctttgtgattatttttccttttgatgaatatgtagtgtgcctccctgtctattttatttagttttggtttgaagtccattttgatcattatttgaattgctacaccatttcctttttgggtctattttcttgtaatatcttttttcagcacttcaccctgaagtaatgtctatcattgacgttggcttgtgttacttagatgcagttgaatgataaacactgcttttctatctattctgtgagtttgttatgttttattgggaatttaggccattgatagggaaggagagaaatatccagttactcttgataactgttattttgttgttgttgttgttgttagtaatggtggtggtggtggtggtagcttgtgtctgtttgtgtgctctgggaaatcaggggaaaaatagagtggcagcagtgggctagggagggatcgattccctggctgagtggtgtctgttgtctgtaagtactgtgcactttggttgctgtggggactgtgggcagtgccagggttggttctcaaataaagacaggtctaaaggagtccacaaaacccagatatatgatttacaggtggttattacaatgagggtaaataaacagttgtctttctgctactgaaaatgcagtctctacccttctgaatgctctaagcacaactgaagagaatgagggagccagcctctcctcttctttataataggtcacatctccatgcctgaagccacatccctagaatatggttcaccactgcttgtccactggctaaacaagatggcactgtgtgtgtgtgtgtgtgtgtgtgtgtgtgtgtgtgtgtgtgtgtgtgtgtttcttttcttttgattttactggtgtgagattgtttcttcagttttaatgggtaaagttagcctcctaagtttcaaattttctaacactcgaatgtgtagatagatgttgtttacatttggttttatttatttatgcagtattttactttatctatggtgattcaaagttttgctggatatagtagtcagggttagcatctgtggtctactagcatttgcagcaatctgtccaggtctttttggattttagagtcttcattgagaagttaggcgcaattctaataggtctgtatttatattttacttgttctttttctcttgcaacttttaatattctttttgttgttgttctgtatgtttagtgatttgatcattatgagcaaggggactctgttttcagttccaatatattctgtgttatgtatgtttcttggaccttacaggcatctccttctttagtttaggaaaatttacttctatgaatttgttaaaaatattttgtaggcatttgagttttgattcttccctttcatctattcctattattcttggatttgatcttttcatagtgcctcagattttctggatgttttgtatcaggaggtttggttttgttttgttttttggagatttaacattttctttgatgattttttctcttttgtcttcaatgtctgagattctctttcccatctcatgtagtctgttggtaaagctttactttgttgttcctgttcagattcttaaatttttcatttcctgaattccctcagtttgggttttcttcattgattctattataatttacaggtgtagaacacttaattcatttctttccactgttgtttttgttttcctggatttattcaagtaatttattaatttcatctttgaggacctttattatctgcatataggacattttaagatctcttttgtctcaagtactttatctatatagcaggatagctgctctctattggaagcataatgctctggctgttgttgattatgtttttgcagtggtgtttggacattgggattttggttgattatagacctaggtgctgatttttggatttgtcttcaatgaaagtgaattatgtttcttggttactggggtttttgtttgtttgtttgtttgtttttgaaatttcagagagtgtgatgcctgtgtgtagcttgataggaaattttctttcaaacatatagttgtggtccctaggacttcgaggtaaaatgcactttgggtttgggagctaacacttttgaataggagtaacctatggggtttgaatggatccataggtgaaaggagagaagagtgttcaaccaggatctgctgatttcatctccattgaatggtggggcacagttaatagaggtcaccccaaacatctgctatagcaatgaaaatatgttttgggacttagttcaagaggaagataaggagaggggaagatctatatatagtctgctatctaggccaaagtggttggtgacttagcaggctacacctgctggatttggtggcaaggataaggcaataagagggtgagttgtggttagaagggaaagatccatagaattccaatgacatggagcaggggtaaggaaggcttcaacaaggtgttctgcttcagagctggtgatgagattggaagaccggactgaaggaacagctagatggttatatttaaaatacatgctgtatagttgctaaaagacaaataatgaactatgccttgttatctgaaacaatggcaatgacaatacattgtgttcttggtttttcagtacataaagaaattgaaacaatgttacatgagcagtgataaaatcataataagtagcttttccatgaagttgtccaacatagagttgtaaaataatagactgtcatgcatgctttgttttgtcttatgtcaaacagttacccacattggtctgagccttcccccactgatatatatttaagaaaatgttgtgaagccaaggcttaatggggcggcttctcaattgcatatctctcctctctaattattccagcttgtatcaagttgatatgaaaatagccagcacagcatatattagcaataagtgaaaaaagaggcaatgagtttgaggaagagggtagaggaatataacagagggtttagattgagaaaaggaaaggctgaatgctataattacagtattactaaatgttataaatatagtaaaactgtattgtaatcttaaacataaaataagatcactagtttctcttacaaaggacacaagttcagttcctagcaccaacttaacagcaacttaggctccagggaatctatcactctctctggcttcaggaggcatatgcatacgcacacatgaatgaacatgcactaacacacattcatatcaattaaaaattttatctttgaaaaatcagttaaataaatcaatatgagttttagagataaatggctaagaaaaggtaatgtttttgtagtgatctttacaaagggaaacactctgggcttcctctatcccattcatctatatgaagatatctgtgaagacaatagcagagaagtagaaaaggatcaggtacatgcagagataataactgagggtgtcctactgacataaataagatcttctctcctgtgaaaaactgtatcgaaagaatactccacacatttggctaaataaaaacaccacagttaaaaattcaccttacttaggacttcataacaaaatttgagggaatacactaaaacatcagtcagaaatatgaacaattttatcgaagaaaatttcaggtttcttttatttctttataaacaaaagaaagtgacagatgtcattttattttttgatgtatgtctgaatggctggacaggagattagccagaaggaatagggctttgttttttatttttgctatgacaatttgaaaagaagagcacaatatcccaggggacttttgtttgagctacggtactaaaaagcaacacttcaattccctggataaaccagcttttcacagagacacggggataacttactttagcaaagtacagtttgatgtgaaaacagtgtacaatttgactattttctatatccatttaagaaaattcagttaaatgctacaagttcatataggcaacttataggtgtgttgtttatacactggacatgtacaaagatttagtttggtctaattaactggttgttttcctagctgtagactccagctgagcattgtgagaagaccggagccagcattattttagcacagccctgaaaaacttccccagaaacaacagacaaggtctcttcattccttacctcctcagaacacattgagacaaatcctatgtattctcactacacatctgtaaaggtcaaattacaagttgacagttttttactttattttgtggagcgaagatgatcaagtattataaaagcacatggttaaatagatggggaagaatatttgaattaagaaactcagaaaatgggatttgaaataagagttaataaatctataatagattataaatatataatttctaggtcaggattacattgttttacatagctctaaaagctgctaatttatagtatttataagtgtacatgtgtgtcctatatatccggcttctgtaaggaagagtgggaatcacacatgcacatccatcatccatcatcaagcagaagagtgtatttccactactctcagtaaaacaacctcatgtttttaatggaaggagattttagaaacaaaatatgtaataaacaattgcagcatttgttacactaagacagaaaacatatttctattacctatataagagactgaacaattacagacagaatatactctgcaaattaaagggaccacctaagtagatcttattacaagaggacacagaaatatttgaataaccacatatgtgaaagtggtattaaatcctttgtgtagctttttagatgttttgatgtaaagatccagagactgaaagatgttcataacatcttatcattttcaatttttcaacaaggagatggtaaaagaagttaaaggtgaacttcctaagaacttatgaacaagtatggtcatgtggtgaagatgtcatctgattggcagaagaaaaagcaaaatcattgaaattgactaatggaacattgaaacatattggttcatgttgtctgtaggccatgtggatgtccacagttcatgctgcctctgtaaaacacatacaagtacatgatcctctctgttgcttgctgctttgggtcaggaaactccttttgcagtggtatcagtggactctagattcataattgagaatgagtgacattaatggcttttgtgagaacttctcatccccatctttcaaataaaagtaacagttcagacaggatgccattgaagacagtccttgcaagagggtaggggatagggagccaggagaatgagaagggaagaagaggaggggtgaggaggacataaggtagcaggaaggttgtgtagggggatgaagagaggagagcaaaataagagataccataagagagcgagcctttatagatttaaagagaaatcaggcactagggaaatgcccagagatctacaaggatgacaagccatctacacaagagtggagaggctgtcttaaatccccttccctgataatgagattgatgactgacttatatgccatcctagagccttcatccagcatctgatagaagaagcagataacactaaactgaactggaatacagtttcagaggaggagtgattagcaacagggtcaagaccaggctgatgaaacccacagaatcagctgacctgaataaaggggtgtccttggtcaccagaatgatcactgggaaaccagcatgggactgatccaaaccctatgaatgtgggtgtcaatgagggtgcctgagaaatctatgggatctcttgtgatagatcagtgcttatccatagcacaggaatggactttaggagcccatttaacatagagggatactccctcaacctagacacatggggaggccctaggccctattacaaatgatattacagactctgaagacccctcctggaagacctcaccctccctggggaggagaaatagtatgcagtaggtaggttgttagtggggggcagaggacgaggggagggagagggaactgggattggcatgtaaaacagtattgtttctaatttgaataaaatgtagaagaaaaaacagaaaaaagaggaaaggagtgaatcaaacacagttaaaaatgtgataaagatgttggtatatatctcttgacagatgatggcttcattattctttaaggggctggccactgggagtttgaccaagctccaatgagtatatgggcaacacaaattggacttggttgattttttttctcttttgagaggagggcacaagggttggagggtggacctaggaagcaagtgcccattgaatgaaatttgcaaataatccataaaaatattatgttggaaacaatttttaaagtgtaattatttgaacttaaaggaatgagtgaaagacacaatatttttggtgagagaactcatcaaggaaattctaaattcatttagttatagggaagaatctagaatggttagacataactatgcagaattaagaagactattgaattcccatatgtcagaaaccccagttacccaagagttagatagaagaccaatgtaaaccttggatgagttgtaagagatgctaccatggatgaaggaataagaggtgttaaaagtgaggcagaggctcctctgccctctgccctcccccactgcctgaggtgagtataggcactgctcatcctctaactgcccccatcaccccatctggctttcattctgagcctgtcccttgccaagagtggacctgcccagacaggaaggcccaccttgagtctagccacagctcacacttgtccctactgtgctctctgctctctgcctgctgcctgaggtgagtctggacactgttttgccctcacttcctccactacaccctcctcgattcttcctgagactgcccctagaatagagtggacggaaggcccaccctgagtccagaaacatctcactcttggttaaccctctgccctctgctctttgcttgaggagactagaagagagggagagaccccacaagtacccatggaagaagtgatgggaagatggcagaacacactcaaccacagaaagacaaatatgacaccaccagaatctagggactccaaaccagcaagatctgaaaagcccaacacagaggatgaagaagagatggaccttaaaaattctgaagatgacagagatgtttaaagaggaaacaagaaaatcctttaaagaaaaagaagaaaaaacaagcaaaatattacatgaaatggaggaaaacataaccaaaaaattctagaaataaacaaatctcttaaagaatctaaagaaagccgcaaaagacaacaaacaagtaaaggaaacaattcaaagagttcatagtttgaaagcagaatttgaaacaataaggaaaacacagaatgaagggattctagagttagaaaagatgggtaaacaaccaggaacaactgatataagcataaccaatagaacacaaaagatggaagagagaatctcaggtactgaagactcaccagaggatatacagtcattgaacaaagaaaatttcaagtccaacaaatccctaacacaaaatatccaggaaatatgggacaccatgagaagaccaaacctaagaataataggtatagaagaaggtgaagaaattcagctcaaaggtacagaaaatttattcaacaaaatcatagaagaaaatttcctcaagctaaagaaggatatgtgtatgcaagaacaagaagcttatagaacaccaaatagattggaccacaaaaataagtccacttgccacataataatcaatacaccaaacataaagaataaagaaaatgattaagagcatcaaaagaaaaaggcaaagtaacatataaaggcagtcctatctgaattaaacctgacttctcaatagaaactttgaaagccagagatcctggatagatgttttataaacactaaggcaagatggatgccagccaagactactgtatccagcaaagcattcaatcactatagatggaaaaaacaagctattccattacaaacccagatttatgcaatacatatccacaaatctagccctacagaaattactggaaggaaaactccaatacaaggaaaataaccatgctcaaaaacctataggcaataaataatcctactttaccaaacaccaaaagaaaaagggaggtaaatccacacataataataccaccacaaacaagtccaaaacaaacaagaatcaacaataaatggtcattaatatccctcaatgtcaatggtcttaaattgcctagaagaagatacaggctaacagaaaggatatgaagactaaatccatccacctgctgcatacaagaaacatatctcaatgtcaaagaagatgttccctcaaagtaaagggacgggaaaagactttccaatcaaatgtacacaagatacaggctggtgtagcaatcctattgtctaacaaattagagttcaaattaaaatcaatcaaaagagatgaaggcaatttcatgctaatcacaggaaaagtctatcaagatgaaggctcaatcctgaatatctatgccccaaatacaaaggtgcccatatttgtaaaagaaacattactaaagctcaaaccacacataaaactacacacacttatagtaggagacttcaacaccctgctttcaccactagacaggaccaccagacagaaacttaacaaagaaacaaagaatctaacagaagttatgtcccaactgggtttaacagatatctatagaacattctaattgaacacaaaagaatataccttcttctcagtgccacatggaatctcctctaaaattgaccacatacttggcaacctagcaaacctacacagatacaaaagaaatgggaattaccccctgtattttatcagaccaccatgctttaaagttagaattcaacaacaaatcaaattgcaggaaacctaaaactcatggaaattgaacaatgcacaactgcaccattcctgggtcaaggaagaaataaaaaaaaaagaaattaaagacttcctagaatttaatgagaatgaagacacaacatacccaaacttctgggacacattgaaagcagtgataagaggaaagttcatagcactaagtgcccacataaagatattggagaatagtcacactagagaattaacagtgtaactgaaagagctagaacaaaaggaagcaaacactccctggaggagtaaatgccaggaaataatcaagataacgactgaaatcaataaagtagaatctaggaaaacactacaaagattcaatgaaacaaagagttggttcttcgataacatcaacaagatatccaaactaaccaaaaggaagagagagagaatgctaattaacaaaattagaaatgaaaaggggacataacaacggacattgaggaaatccagagaaacatcaggtcatactttgaaaacctgtactccacaaaattcaaaagtctaaaggaaatggacaatattctggatagatatcacttaccaaaattaaatcaacaactgataagcaatttaaacagacctataccccctaaagaaatagaagtagtcatcaaaagtctgatagccaaaaatatcccaggggccaaatggtttcagtgcagaattctaccagaaattcaaagaagaggtaatagaaatactcctcaaattgttccacacaatatcagcagaagggacattgtcaagctttttctatgaggctacaataaacttggtacccaaatcacacaaacacacaactaaaaaagagaactatagaccaatatccctcatgaacactgattcaaaggtactcaatataatactggcaaatcaaattcaagaacatagcagagaaataatccaccatgatcaagttggcttcatctcaggaatgcagggatggttcaacatacaaaaatcattcaatgcaatccaccatataaacaaacagaaaaagaaaaaccacatgatcatctcactagatgctgaaagagccttgaaaaaaatctaacatcccttcatgaaaaaggtcttggagagatcaggaataacaggaacatacctaaacatgataaaaaacaatatacagcaaaccaacagccaacatcaaactagatgaagagaatatcaaagtgattaatctaaaataagaaacaagaaaatgctacccaccctctccatatctcttcaataatgtacttgaagtcctagctagagcaataagacaacagaaggagatcaagggtatacaaattggaaaggaagatgtcaaaatttcactatttgcagatgatatgatagtctacataagcgacctgaaaaactctatcaggaactcctacagctattaaacaccttcagcaaagtggcaggatacaagattaactaaataaaaaatcagtagccctactatatacagatgataaatgctctgagaaagatgtcagagaaacatcacactttacaagagcaactaacaacataaaatattttggggtaatgctactcaaatttgaaagatatgtatagtaagaactttgggtcttcaaagaaagaaattaaagatatcagaaaatggaaagatttcccatgctcttggattggtaggttgcacatgataaaaatggcaatcttggcaaaaggaatctacagattcaatgcaatacccatcaaaatcccaacacaattcttcacagtccttgaaagaacagtactcaacttcatatgaaaaacaaaaaactcaggatatccaaaacaaccctgtataatacagaaacttccagaggcatcacatcccagacttcaagctttattatagagccatagtcctgcaaacagattggtattggcacaaacatagacaggtagaccaatggaactgaattgaaaacactgatattaacccacacacctattaacacctgattttgacaaagaagctcaagttacacaatggaaaaaagaaagcatcttcaacaaatggtgttggcataacatcttcagacatgcagaagattgaagatgcctatctatcacgatgcataaaacttaagtaaaaatggatcaaagacctcaaaaaaaattcagccacactgaatctcctgaaagagaaggtagatgataccctcaaacaatttggtataggagaattctttctgaacataacatcagtagcacaaccattgatattgacaattaataaatgggacctcctgaaactgagaatcttctgtaatgcaaaggacacactcagcaagacaaaacaccttcccaaagaatgggaaaagatattcaccaaccccacagatggctgatcaccaaactatacaattaactctagaagctagccaccaaaacaccaaacaatggaattaaaagatggagtgcagaactaaatagagaattctcaacaaaggaatccaaaatgcctgaaagacacttgagaaagtgttcaacatccttagccatcatggaaatgcaactcaaaacaactctgagataccatctcactcttgtcataatggctaacatcaataacaccaatgacagtccatgctagacaagatgtggataaagaggaacactcctccattgctggtgggagtgggaacttgtacaatcacgttgtaaatcaatatggcagtttatcaagaaaatgggaatcagtctacctcaagatccagcaatccctctcttgggcatataccaaaagaatgcacactcatacaataaggacatatgttcatagcagcattatttgtaatagccagaacctggaaataacctagatgcccctcaactgaagaatggatagagaaaatatgatatatttacacaatggagtactagtcagcgaggaaaaaagtggaatcttgaaattcgcaggcaaatggatggagctagaagaaaccatcctcagtgaggtaacccaatcacaaaaagataaacatggtatgtactcattcattattgatacatagagcaaaggattactagccaacaatccacactgccagaggagttaggaaacaaggaggaccccaagagaaggttgcatactccctcgaagaagggcattgggacaagaacccctgatcaaattggagccccttgaagaaggggagggggacaagaaccccttttggggggatggagaggatggaggtgggaagggaagaggcggagaggtgaacaagaggactgagacagggaaggaattgaggaaggcaagcaaggagatgccttgatagagggagacagtacaggtttggagggaggtctggcacaggggaaatgttagaggatccacagggatgaccccaactaggaatccaagcagtggtggagaagatgccattgattcccccccacacattgaaattgatgtgtaccttggttaccattcctagatccttcatccagtagctgttccaagcagaaacaggtacccacagctaagcactgaaccatacccctggaatccagttgtggagagggaggaaggatgagcaaaggagccaagacagtgctacagaaactgttgacctgacctagtgagaacatggagaccctagtcataaaagctggggaaacagcattggcccaaacaaagccctctgaatgtgggcgcctggtaggaggccaagacagtctatgggacctctaacaatggagccagtctttaaccctagaacacaaatggactttgggagcccattttctatgaagggataatgttgcagcccagatacagcaagcagggcctaggccttctccaaaatgatatgacagactttgaaggtccctggtggagggcttcactatctctggggatgagatgggggatggattagggagttgttggggaatttgggaggatgggggataaatatgtaaatttgagtagtaattaaagaatttaaataaaaataaattaaaaattaaaaagtaagaaacagacatgaccatagatgccaatatagatgtctagggtaccctgatacctatgggttttaatgctaaggattccttttttctgagagacagaaaaaatctggaggctgaaaaatgatagagattcatcatttctaccactgataataaatagaaaactactgacagtaacatcttctgcagacttgagagaaggttcctaaagctgaacacagaacgtcatccacaggaaatacaggaaaatttccagagggacagaggataagaatggggtaatgtaaggaaaaagggaaacacatttggaggtgagttccataatgacgtttttcttgggtaatatagctttgcttatcacagatccataggacaccacacttaggaaataggatacttcagttaaaataagaacctctatcctgtgttctatttaaattaatattcaataaaatacaagaccttaagatattaaaattatgataatttttataatgctgtgactgaaaatggaaacatacacaaacttttatttgaggaaaattgatttcagtggggaaaacaatatttacatttctaacaaaattatattggcaatttttgactaatatttacttgccttaaaataagctttatttttaagaaaataaaacaaaattaccaaatggaaatcctctggttttatatattaaagacttgatttttatgtaattaaactattcattttctatcatattttcattaccacaacaaaatcttaaagcttcaaattatctttcaattccttggtactgttaaaaaagagctttcctttgatatgtttgtgatgggtgtggtggggtgggaggtagatgactgggtctgtctggtatcaaatgccatctgtttggacaggttctttttgtttttgccaccatgtatgccatactagctataggaacagaagctcatgaaatctgtccatctacatccaattctgcagttggagcactgtgatatttgaaaggcattctcatggtcttctttacatgcgtcctagagatccatactcaagtctcatgctctgagacaagcagtttagccagagagccatctcccggtccaagacactttaatgtatagataataggaaaactgattaaaaaaaaaaaacaagttttatcctacaatcaggtataatgagattgtaatccaaattcttccattttcttttaaattaactaaatctagtttttcttcaataaaacggatactctttaattttgggagccaatattttgtgctgaatccatggttctatttcagtatgggatgctcattcctctgaatttccactagttggtacctcttgggtggcacacagatggtgcaacacatcttaaacttacttaaggacaggcttacactactgaactcaatatctacttcattccatgattcctatttaatatgagtagctgtgtgctgtattcaaaaacatggatgctttttaatttctactcaaactgctatatacatgtgtgtgtgtgtacatgtgtctgaatgctttataaacacatacatatatacatatatgcatatacttatgggtgtatgtgcatatgtatatatacacacacacccatatatatgtacatagatactgtcttagtgttctattgctgaagggagacaccatgattaaggcaactcataatgaaagaaagcattacattgttgcttctttagagttttagtggtttagttcataactgtcatgtcagggagcatagcagcacataggcagtcatagtattggagatatacctgagatttctagatcctgattctcaggcaggaggaagagagagactggttctgatttgagcttttaccccagagcccatctacagcaacatacttcctccaacaagggcacatcttctccaatgaggccacacctcctagtccttctcaagcagtgccactccctaatgatctgtcataaaataaatgaaactatagggccatcattacctaaatcaccatgaataaatgtgcacacatacacatacatatatatacataagtgcatatatacatacatacaaacatgttcaactaataacatatttaaaggaaaataaaaatataaggtaggaaactggctttctgttggtaaagagatttcctcttaacaaaagttatttttctttttgatggtataactccattttcatgtaagtatttttaaattaaatgctgctatgtttgtgatttagcagcctttcattgggtagaaggctagaataatagggcatgtaataattttggagaattagagaaagaaaaaggtggcttatacagatgtgaggatgcacaaagacatgtttataacaaagagactgtgtcctgtctgagaagagaagcagagcaggagcagaagaactgaaatggaaggtcctcacagagtaggcacttcatctgctaccaggctggtggcagaacactaacttcctgtctgtgtctcccaccagaggtcccgaaaggacagatctacacttcctaattccacacttccttgagatctacaaggctttgctctctccctttctagtcaattcactctctctgcttgtgtctgtggttgaagatgtgatttctgattttcctgcactggccacatccctcattattgtgctcgctttgaatcataagcccaagtatatgctttcttttataagttgtttttgatgacagcaaaagaaaagtaaataaacaacattgaaaatatgtgtgtgtgtgtgtgtgtgtgtgtgtgtgtgtgtgtgtgtgtgtacaagcacacaaacaatcacactcaagactcaagagcacatgaacacatcttgatagcttaattctaagaagtgattcattttacagacagaccttagccaattctttctagagcacatttagtcaagaagtacatacaaaaaaagggactctattgtgtccatgggcaagtcacctaagatgaaatctggcttctccctagagttggccagtgtggtcccataaggaatgtataattgtcaagctgagagaagtccagggagatattgctttgtaacactgagttaaaataaaaaaaaacataagattaagaaatcatctgatgttataaattgatgagaaacagtaacagtctcatcaaaccaccctatgctttctaattgtgttttcttaaagctgcctataataaagaaatgccaatcaatgcttctgttctagtttccagtcacatatttgaaaatgaattcaccattttatatctagaaattagaataaattttatgtcattataaaaataattcattgtaaaagttttgttcaacatgattttttaaattaagaatctagctcaagtttctccttgttgtcaggcatatctgaggaaattctgatttattttttactccaaaacataactcaataacggatgttgaaatttgtccatttaaagtggaaaataaagcaaggtcactggtgttccaaatgtcaaagggcaaaggacaagagaattatgatataggctgcattcatataattgaaaagggtttgtctgtaacccctgtgtttaactaacttttctaatattttaaaggtgtgtcctttgcatgaaaataattattcattgttacttttgtgttattataattataccatttcttctcatactatattgattaaaaatattagcaattggaaagaaaataactttcaggtgtactctaagaggaaatttgttgctagagtgtgttaaataatttctggtttgaaaaactattttaatgtgtagtgaaactattttaatatgtggtattgaacataatttcttattatggcttctactcagtaattttgtgacatacacagtttcatgatcactctctgcagatgttcatgaattattgatctaatctctgtttaaaaaccaaaaccactttgctccattttttttctaaaaatggtgtatattatgtaaaaatacaaagaactctattactcatgatataaaattatgctttcaaagtacactatcatgccttaaaataaatctaaaccatgttcgtttgcagaatgttcttcaacatctaaaaatatataaaattgctacagtgatgattaggtataacttgtgcactaaaagcaacatgatagccacacaccaaggaaaatttggtgactggaatcaataaattatcttcatattttcatataaactcctcagacttcccttcaggcttttatagtctaaacagcaaggcagagctcacaacctccggatttttcttcttttagaaactacccaaatgttcaaatttgattcctatgaactctcaacttcgaacctgtgccataagtctatttttgtgaggcaaaaaaaaaaaaaaggttttcttgtcaacttttgtttcacttgaactcccctagagtattcaaggacaaagcatggttctcaaatttaaaagggtatctatttttatagttctgtgacatggtcatgcaacttttgcctaattcaaactttctatgtacttcagcttctggataaaaattcattttattcctaatgaaactcaaggttactttcaagcaaaatctcctgaaaggagaatttaagcattcaggaaaacggttgaacatcaagtatttggttggatgagaacaactgctgttttttgtttagcagtacaatggaactgtacaattcatctgatccttgcaaggttattagccaccaattttaattagttgatgagttgcttttcctattacatctgaggatatatctgaagtacccttcatttaatatggctataaaacttgtaaatgataatttggttgagaaaatttaagtttaaagcctttgctatgagatcttcagaataatgactataagacaaaaactgggaacaagtaaaggaggaggaagcatttctggaagacttggaaagatgaaggtttcaactttgtttgctcctggttttacctttctctagatatggaagtgaacaatatatctgaaataaactggtatcaaaaagaatcaattctgaaggagctgtgactatggccccactggggtagtgcttgcctagatgtaaaaatctctacatcccatacccagcactgcacaagaataaactgagaccagtgtttcactcctggaacactcaatctcttagcatttcagaataagaggtagttagattacaagttgtaggtcatgctcagatactcatcaagaccacctagagaaacataagaacctgtatcacaaatcattctgatgaatattattgaaaatctgtaagaattttttatctatccttatgtagaaacagaaagtaaaatttaggaagaaaaaagaaaacaatccagaagacacgaaaatgcacagtactgcaaatgctctcatttcctctataagccttcatcagaatgatctttatgaattctgacctcagcaagttccactcagtagatattcaaaggctttgaataaatttttaaatgcccataccaattaagctaaattcaacttaattgaattatgtaaagcaattctaattcccactatgttaatagttgccaagtgacttcatgagaacaaaatgtcagtgacagccatagaataatttgagcaatgagtgtagatgaataagtcactcccttggccattagcaaggagctcaagcgatcattataagggacacacagcaaagggttctagtggcatacttgttaaagttaatgacaggccaagtaacatggagactaatgaatttctctaaaatgtgggtaaaaataagtatttctctcattttcaggacaaatgtaacaatcgggtcactgtggtaaattcaaaggtctatgaacacacgcactaacacacacacacacacacacatgaacagaaaatgacaaggagacatcatccatgaaaaactttctcatggacagcacaatagactcagacatataatcattctaattctttgaatattgtactggcctttaagtcacccagtttgtggtgtacataatgccaaaaaaatggctccatattatcatttgtcaaaaacaaatcttattctaaagttgcaaccctaactgtctaaaatcaaaaatagctgggagtttagctgtggagcacttcttggtttctgaggtctttggagtgctttaacctttcaagtttgtatttctgatttcaattcattttagtgcaggtgtcactacaagtgctaaatgagacagtaaatatgaatctcccatttcccagagacagttctacgtgccatataaggacagagcaactaaaaaatcctttaagagtgatagggaattctcacaattgtgcaagttcatggtcataaagtggtcaatctcagcaaaatcaaatagaaactgtatttcattattatggtgacatatgtgtggacatgtatgtttatgtatatatacatgtgtgtgtatttctatatattagaagagagactaggaactaaacccagtatccattcatcactgagtgatctccatgctgaaacctactattttatgattgatagtatttatgcaaaaatataaaaaacactacaataaacccctagttgaataaattgctttatttgttgctataatttgttttaagttttcactcattcccacacaaatcttcacttaaaaaaagactttggaatgcatttcaaataaatctaaaaaaataatgcatcttaaaatgcattaaaatgtttacaggtatgtgaaatgcaagaactgacagttcacttcatttcctattcatcacattaatgatttgtgagtaagaaaaaaaacagctcacgaatgccatccctccatgtttggataacttctccttacaacattgacataaatagagataaatggctatttcctgacagtttaggttttgcttcagaaattatcagtcagaagggttgaactgttcaggtaaaaagaaaattttcttaagacaaccattcataccaaaattgcattcccatccccttcagttttggtgtctggggaatagcgaccttctgagaaaccttccatacttcaagtaatcactatgcaattgaatcttccttaaatagcctgttcttagttttgcatgggtgaaattgtatctactaaaaattgctatctgtggctctaaaaatccatttcatagtgtgggatctgtattttaagtgactccatttgacattcatgaaaaatcaaatcaggaatatagatttggaaaataacgttgctttcatggagtatttttcctaatgtgtctctagctttgagtagctctgttagacagcatcctctctcattagatgaaaacaatgtgtttcttcttgtagtcagcaccctctttcattgggtgagagcaatgtgtttctttgttgctccctttccttctaatccaaatttccagtaggttcttggcacatgagttgcttgtgtcagcaagaatatgaagatgcatataggcaacctgtgtttcttttttcaatcatctttctctctttttatttaaattacaaacaatcctgttttacatgtcaatcccagttccctctccctccctcatcccctacacaccacgacctcctatcccactctctttctgctccctaggaagggtgaagccttccatggaagatcatcaaattctgtccatcatttggagcagggcctataccctcccctgtgtgtccaggctgagagagtaaccctctatgtggtatgggctcccaaagaccatttgtgcactagtgataaataccgatctactaccaaatgcaccatagactacccaggcatcctaacacccatattcaatacagagagactatattatctctgcattaaagctatgttgtagttcaaatagacagtgggatctcttggattgtcactgcctttaggtactgacagtgactgaggggcactgcacatagtgcacactgagcacccacatgtcaaccactggagtcctgtgacctcactatacaatagactactgtgtaaatgaaggcacagaaatggtggtgcatgatacatgtcctctacctatgcatctgctttgtgggctcactagaaaacaaaatctcaaagtgaaaatcatagcaagtcataaaatgagttgctctcttcagttttgtatcctgagtgcaagtctcatagccatgaaagcaggtgtgatggacagtctcatctgtctttgcatttattatacattccttatctgttataatattgtactggctcttagaacttataactactattgccttcagaatttcctttcctcagtcattataaacaaaattgcactgccaactacaaaatcttctgcacctacttctttgttcctgtctgatcaatcaaaacctgtagttgcttacagctcttcttttttcatgttagtaaattattttaggttacctctaaagaaaaagggaattaatggttctgtctagggctgtgtgaagaagtaagaatcaaaaggagcccaggaaacaggaccatacagagtcaccgggagtctacatctccaaaatgtctcatgtcttctcaagcatgccctgaatttgggcccaatatagtttatgcttataaacattttcagttccctcacacatgatgaatgacatggtctttgcatttattttcactaacacaagaccatctcactagctttagtttggactttcaggagaaaaataaattcttttgcttagagagcaagggattggtattttgggataatttatatcagtaactcttgtgcaattacatagattgctatagaaaatgacccagagaaatgcctggatcctttgacttaataagggggtgttggatgcaaaaaaagaaaaaaaaatggatgtcatattcttatacccccaactcacatgcctgaaaagacttttgctttttgtttcttttcttcatctttctcgtagataaggcactgaagtgtagcatcattaaaaaaagatctagagactgataatggggttcaagctttgagcagaagaaaagaaaagcaaagtagccagcctctagctcttactgatacctcaggctgaaagggctgattttgctgtctctcctcagtgtagctggagaattctgacactaaaagtcttcctatccttattgtggctggagaacaaatacctgatactgagaacttcttccctagtgctgggattaaaaacatgtgatccccggtgctgaggtcacctctgtgtgagctgtttctctttaggactggatcaatcttgcgtagatctggatggccttggactcatagaaatccatccgcctcttaatcctgagtcctgtggttaaaggtgtgtgtctccacctcctagcttctggctgatgggattaaattcttgtgcctggcttctatggcttgtgactgtctttgttttctgaatcctcaggcaatctttaataaattataaataatataataccacattgaagctatttttaatgtgttaggccacctcattgtatcccttttgccaccatgtcaaaataagctgctgcatctccatttaaacagagatcaaatccattgctgtgctgcacaggtgtatactgactgcatctcctgaaaactaatttatacattccacacactttctgcttgtgacactaatctgttatttttatagccgaaaatccttagccctagcattagtcaaagaggagaattcacttattttgtaatttccaatctcttcagttattttaaactgacatctcctgttccaacacactggtcttaatacatctctactggagtaagcaacccaagaaagactttttttttttactctaaacacagggcatttgttaccccttaacttcccatcatcctctaaagtttcatcctaatgctgaataaggcaccgagaaggtgctacaaattggttatgccaaacttctcagaggtgtccgtgttttcacaggaatgttaacttttatgtcattaccttttggcttttggatttgtataattttatgtctattatcacctaaatgaatgtattttcttgaggaccagcaacctgtctagtatatcttgtatcttctacagaagaactaactcattggccaagtcctgccaatcattgggattatataaagccatggatatcttcatataaaacaagtggctactgttttgcaataatgctgtatttgatagtttcgtagaggttgaatgattgtcaaacactgaacaaatttctatgtggacttttgtaagaaaaaaatgtttgccaacccttgatgagattctggcatgatatttatgatgcagtcatttatcagaaagatgattttcataaacttacatagatgttttacaaattaactggaaattatcatgtggacagatcatttctagatggtttacataacattttaatttttggtgcatgcaggtagtcttcaatattatgctatcacattgtaatgtaacttgaaacatttttattttatgtgtacacgtgtaaacatgtatacacaccacatgtatgtagtgccaacagagatcatcaagtcccctggacctaaacttaacagaaaatttgagctaccatgtttgtgctaggtaccaagccaaggttctctgaaaaaacagcattcaatctctctatgcttaatgttctcaattgttcttgaattgaatgctacattttgcattttgtaaattgttctattatattcatttcattgtatattattttcatgccagataatacaacaagttagaaatccaagcagcagtgatagcgttgtttcagaatcacaggaataatgtttgctgagtatttctctccctgatatttgaaccaaaaatagcaagtgtgatttattttgtaactaaaatgccaacataaattaatgtttacttcactcatgagcaatcaagatcctccaaggtggggggtacataaatcaaaattaattttacatttctaaattataatgcacttgattatacaatttttataattctaaaataatcaagaattgcttaagaaaaacaagcagttttctcaggaaatttatgaagtgggttagtatatagaaatgtgagataccaagattctgtccgtactgtacatagataatatttaaactatcaattcttattgtaataaaacagtcattattgagtatggcaattctcactttagcaagtggaatcttaggaaatgctttccttgggaattttctgtcatgagcctagtgtttacactatacatagaatatctagaaactctgtttaatagtctcctccactcccagggttattactaataaaatgtttgttttacttttctattgctatgatgaaaccatggccaaggcaacttatataaaagagggattaatttgggtctatagttccacaggaataaagttaattgttgtaacagcagggagcagggcatcaggcaagcaggtatgacatttgagcagtaacctagagctcccatttttagacaaaaccacaaggcagatagagacatgcgtaacactccagtcctgaaatctcaaagcccaaccccattaacatgtttcctccaataaggccacaccttctaatccatcccatacagttccatgttgggaccaaatactcaaacacatgatcccaagggggtcattttcattcaaactaaccacaatgtttcaagttagtctggtcctaaaatctttgaagttcaagcttcacattcatgattaaagctggctccactcaataactgatacctgggttttctccagcttttttcaaggagtcatgactcacttcttagacatgaataacaacaagttgattggattctcatgttttgcttatcaattcatctacaaagatatattaactgcttccaaaaaattagcaacctcatgttaagcttctataatcaaccatgtgaaatttttttttgtacacatgttagtgcttcatttggctaaatatttggaaagcaatgactggattgtatcttaaaagaatgtttcacttaggggccaggaaaatacaaaatacaaaaaagaacaagaagtggtcttgtaaagtcaatagtagaaaaacagagacagagaatttcggggccttgaggaccagtcaagctaatttatgtcattaattctatggaagttacagattattacaaaacaaaacaaataaaaaactggatttgattgtgtaggaggaatgacacctaatattgtcctctgcttgtccacatgtgcacatatttaaacacacacacacacacacacacacacacacacacacacacacacacaccacaagcatgaatattttagtatataagacactgaaaactaggcatctctacaatggtacatcactggagaggcaaggaaaatgcattcctgttgctctatattctattccacattcagtaccatcttccttccgagctgtcttcaaagaggctttcaatggcctccattgttttctctctctgaagaacttcttttaacaagtaattcttataggatgggtgtctgagcccttaccaggttttgacctggaaggaatgacaaactcagctagttggttttgagtacaacataaattgtacttcacacttatgtcaaagcaactcacaagcaaaagcaaacaatcctaagaaccacagacaataggctcacagcagggggtacctctcctgcagctggcggccctttcaggacttctgcttcagaccagcaaatctcctgagggtgtcatggaaatcaggctcagaatcggccgcactcagcttgaagtaccggttgtcaggttagcacaggagagatccaggacatagagtcctggtacactctaaaattcccagttctgagctggtccttaaatagttcactaaatcatgctaatcacactttggcacacttcacacattttcacacttatctacaacagttcggctgcttagtaggcctacactgcctttcctttaatcttccttcagccaggcctttgcctgcctggttgtaacttctgtcataatctccctccagccagacctttgcctgcttggttacaagggccctatgatgggacaaaggtaaatgtagaatcacattttagttttattgaaaaaattgtttgtttctcccccattaacttcaccaaatatctattagtattaaatttgtgtgaataaaggcatgagaaaatgagtataatatatgttgttatggaatagtgacctgaacttcagcttacattaacaaatatattgcatcatattaacaaattctatggaagctgtttgtatgactatggtgaaaataaatttgtatctacttatagagtcatttaaaaactacagaatttttgttgctaggttcttttatttcaaaagcttagatgctcattgtactctggtcttagcttgcaaatgttctgagaagaaatcagttatatttgtgttcatatttctctgcacactaaacagctccctttaattcttgtcatattcttttaacttttcttttcttttcttttaaagaatttgaatttgaaacagcagaaaagatggctaataaagaaatgattctagttttacaacaatgaactgagagctctctaaagatgacaagatgcttgtgtttggtctttatcgctgctgggtggctaggtgtttccaggtccacacatccccactcaggctgaacctcatgggttaaatctgagacatgccaggtcatgacaaatacccaaagctccagaagtcttagagactgtaaaattcccagcagagataccctactggacctgaggaattgcgagtcacaagaaaccatggccatttatgccagaaaccagaaaggaaacagaaatcaaggaacaaaacacccatccaaaagagacaaactcagggatcaatacctagacctataataattccaaacccagatctcaaaatgccagtgtaagaacacagtcaacaacaaaaagggatgtatggtactaccaaagcccaggtgtctgatgatagcaagacctgaacattccaatgcagctgaagcacaagaaaggctacataaagccaaatttatgatgaaagagatccatacaaaggaaatgaaagaaaatcctttagagaaattgaggaaaagacagacaagattggaggaagtcaataaattccttaaagaatgccaagaaggtgaggaaaaacaagaggtgaaagaaatattttaagagcttaaaatggaaataaaagcaataacatacacacacacacacacacacacacacacacacacacacccaaaaaaaaaaaaggggagaattttggaaaaggaaaatctgggtaaatgaacaggaattatagatgcaagaatcactaacagaatacaagaaatggaacagaaaatctcaggaattgaagatatgatagacaaaatagatttatcagtcaaaggaaatgttaaatttttaaaaattcctagcacagcggggcgttggtggcgcacacctttaataccaacactcgggaggcagaggcagggtgatctctgtgagttcgagaccagcctggtctacaagagctaattccaggacagcctccaaagccacnnnnnnnnnnnnnnnnnnnnnnnnnnnnnnnnnnnnnnnnnnncaaaaaaaaaaaaaaaaaaaaaaaaaaaaaaaaagaaaaaatgctagcacatagcacaaaacatttaggaaatctaggaaaccttctggcttttatagtctccatggagacatcaggtctaattctaccatatctgactttatatgttacttggccttattttttgcagtttttaatattcattctttgttctgtatttttagtgttttgattattatgtgctaaggattatttcctttccacttctgtctatttcatatattgtaggcatcttttgatggtattcatagctttccttctcctgtggaaacaaaaagatcaagaaatcacattttgaaatataatttaagcacatatatgtactccaaatactggatttttaaaagcattctaggcattctttcatgaatcacgttcagtagtttctgttgttttctggttttgtttttctttcttttttttttttttgttttaccctctgactatgattgtcaaatgtcaaataataacaatatgtaagaaatgccccaatgtaaggtggcatggtccaccctaccttcccagatgtgggttggatgaacacatactatatgaaaatctgaaaagaaactttgtgccttcctactgatctgtgccacaaggagacatgagaaagaagtttttaatgtgactattcctgtagacattttataaagtcaagccaactacatcacagattagtcgcctgtgaaatttctattttatgctagctttagtgtatagtaattgtataaggaatgatgcttcattatgacatttgcttatatacatttgtcttaattacacttctattgctgtgaaggggcacaataaccaagacaactcttttttcttttttctgtaccaattgttatttattactaggatttaaacttttttttaatgaatgaactttggagcagcttgccctacggcatggtcttgtctacttacatgatagcttaaaagttgagggagtctgtctgtctgtctgtctgtctgtctgtctgtctgtctgtctctctgtgtgtgtgtgtgtgtgtgtgtgtgtgtgtgtgtgtgtgtgtgtgtgtgtttgttgattttgggctctctcttggcatggtcagagagcaagaagcatagaggcaacttgtggttgggctttttacccctgtgtagaatggctggatgaatgcagctgtgttagcagaggcatctgctttgttctgtgtttgtgagtttgtcctttcattataccccttaataaattggttattagacttttgtgaattcttattttactccttcaacaaggccatacctcatccaacaggccacacctcctaatcctcaccaaacagttcgtcaagtggaaactgaacatgtaagtatatatgcctgtgagggtcattatcattcaaatgaccacaacatgcattatcctgtctcattcacccttattttccccatacccatttcacatttcaaagggtcactttttatttgaatgtcctgcctgttatttatctggaattccacagataatgagataatataggctatttctgtgtgattctggcttattttactgaacatgatgatcttatgttcaattaattgtttgccaaataccccattctttgtttcatttaagcctgaataatttcattgtgtatatactccaccttgactctatgccttaaaccatgaaggcatgactagactgaactgagaacttacagttgtgaatggcacaattaaaaccatagtattggtacattttcatatacttattcaggcaaattcatttgcccattttttgacttgatcattttatcttttcttgtttgagttaaagtcacttatatacttagatattcatcttctgttgcatgcagttatttacaggttgatggtatgaatgcagggtaaggaacatcagcaataacatagtaaagacaacagaaaccagacagtattcacatcttgggtaaaacattcatgcaatgtatgtttacatatggttgtatttactttgcaagttacaactgttttatcatactacattttaagtatctgaatgcagaatatgcacatatacccataagatgagtcttccagtcatgtgcaccagcatcacatatgtaaaaattttcccactaaaatataactagataaaagaatttctggcagatataagggaaacttagtgaatattttaccagagatttatgtgataagctttagttgaatatagaccatttgccatatgaataaagctttaaaacatgagaggaaaaagaatttcctaaaaacaaaaatttggccatggttgttacactgaaaatatttctgacatattaaattatacaaggaagaacttgttttaatgtcttaaaaataaaagatagtgtctagttttgttttttgttttttttgaaatttctctcattctttgattgaagggtcttaccacaagctagacaaatttaccatagttggatatcctcagtctttcttatatttttttgctgaaacttaactcattatgaaatatttcctggctcattgtaccagatacaaattggttttatttggtcatgttgtaattatgtagagagaagcatatcttgccaataaaattaagaagccatgcttgccattagaagaagacacactcattaattttcaatgatatattatatttgactaataaaataacagaaaggtactctgtttaatgggacttcaaagggtatatctatagattcatttgagatgcaaatcataaatgacatagacaaaaaccaaacaccagtgtacagtgaaacaaggaaggaagaagcacatttcctaagcagaccctgactgaggccagagcctgtaagaagctattgttacgaagcacaagtgaagcctctgtagaacatagtgtagaacaagccacaaacaggagaatggaaagggcaaaagctcaaaatatgagccaaatccctatttgggggaaaggtatgtcttgcctgaaacatgctacaagcaaagctaatccaacattaagatgctgagtgccatgaagggtccaaaattatcatagcaatgcccacttgatctacaaagcaaactcaggtgaaatattgcatataattagagagtaattgccaatatagtttaccaatattggcaaactcttaataatctaataagttaattctttcctgccagcaggtgattgacatggccttgggaccctgagatggcaccagtccagtttcctatttttccagacacatggagcagatggcatggtaactcctctgtttacactgaaatgatcccattatcattttatttttcctggcacagggataatggataagggaattcttatgggcagaggaaaacactttcaaaaattatacccttaagcaatacaatatatagttggaaagaagaaatacttcacttgactgggaatctataattcataatgtaggagttgtgttactttaaacaatttttaaaacatatcatgaataatcttcattgtaagccattatttaaatttttaatttttaaatttttattcaatgattttacgcagatgggtgttttgcctgcctgcatacctgtgtgctatgtctacgccttgtgcctgtggaggccaggagagggtatcaggaactgtaattgcagatagtactaagctgtaatgtgtcactgggaattgaagctgggttctctggaagagcagacagtgctcttaagcattgaattatctctccaatttcttgattgtttaaaatcaggtaattattactttagaagaagcagaaaacaaattttaagaacaatgtggtaaataatttaaatatttaaatattctatgagtttcacttttctatgtcattgtaattatttagtttaactatagaaatgtttgttttgctgattcagttcttgatttctttcttttttttttttgcaaaacttaaaagggtttttattcagttaataataaaagaaatttccaggaaagtgttctgtttactctatacatttcttcagattttcatgataaaatttagtataaaaatcaaagtattagtacagatatttgtttgttgaagagatagaaattttttagattgaatatgttctatagatcaataactattgtcatgagtaaaagtgcttaccttaaaaagcagtgtcctattgtactattatgttttagggtgtccattgctgtgaagagacaccatgaacacagcatctattataaggaaaacatttaattggatgtgtatgggggtaatgtacaattccagaggttcagtcagttaccatcatggcagcatgcagattgacatggtgatgaagaaagaggtgagagttctacatcttggtatcatgagcacagtaaacatcaaagcctactgccacagctattcatgtcctctaacaagagcatacccactccaccaaaggcttacctcctaatgtgattatggaggtcaattacattcagtaattaccagtgagtaaggtattttcttctgtatttttcttgcaaagtacaaaatatattaaactaatcctatcttttatcatcataatataattgtgaaataatccctatttttgacaatgctctttacttatggaaaaagaaaaaactggtggttagattaattaaaaatttctacacactggatcataagaagaaagaaattctcagcacctgtgctatgttcaaaagtcttctctgcaagattattccccactttttccctttttaaatttcattttacattccaaccacagttctccctcccatccctgctaccaccctcttgactccttccaacccccctcactgacccctagcccactcccagtccattcctcctcatggataaaggcttccatgaggagtcaacttagtctggtacaacaggttggggcatgactcggcccctctgccatgtattaaaactgaacgtggcatccatagagaatggactctaataagatagctcatgtagcaggtttgtatctgtatcatggttctactgccactgagcatggtatcccacactaagggatgggatccaagaagctagctcatataccaggtttgttttgtggtcttactgccagagtcccctctgatagtccaagtttcacaactgtctgccacatatggaggggctagtttagtctcctagagtctccacagatgtaggtctagagttcatgagtttccataagcttggtttaactgcctcagtagttttctccatcatgatcttgacctcccttgctcatgtgttccctcctccttctctttgactagaggcccagagctccacctggtttttggttgtgtatctctgcatctgcttccatcgattactggaagaggattctatgattgtagttgcgatatccatcattctgattgcaggggtagactagttcatgtgtccattctactattgctaggagtcttagttggggttctccttgtggattcttgggagttaccctaacttcaggttttcccctaagcccatagtggctctattaagattttttttttcattgcttttctactgcatccctcaccccctaggccatctcattccctcgtgttctcatccctcttgcccttaccacccacacccccgtttgccctgatccatttcctctaagggtcctccttgttacctagcttctctggagctatggattttagtctgtttattctttgctttccttctaatatccttatgagtgagtgcatactatgcttttctttctcagtctgtgttacctcactcagaatggttgtttctagttctatccatttgcctgaaatgttcatgaggttatcatttttttaccaataagtagtattccattgtgtaaatgtaccacattttccttatccattctttgtttgatgggcatctaggttttttccagtttctggctattataaacaatgttgctatgaacattactgagcaaatgtccttgtagcatgataaagtatcctttgggtaaatgcccaagagtggtatggctgggccttgaggtagattcactcccaattttattagaaacagtcatactgatatccaaaatggctttaccagtagtggaggactgtctctctgactccatatcctctccagcataagatattcacagaattttttatcttatgcattctgacaggagtaagattattattttgatttgcatttcctttatgattaagaattgagtactaccttaaaaacttttgatcatttgagattcttttggtgactattctctgttttgctctgttccccatttatcagttgagctatttgtattttgatgtcaattttcttgatttctttataaattttggagatcagccctctgtcagatgtggggttggtgaagatcttttccctttctgtaggctgatatttttgtcttattaacagtgtcctttgccttacagaagattttcagtttcaggaggtcccatttattgactgttgtttttagtgcctgaggtactggtgttgtatataggaaatagtcttctgttgccatgtattccaggctacttcccactttctcttctattaggttcaattttgctggatttattggaggcccttgatcctcttgtatttgaattttctgcattgttatagataaggatatgtctgcaatcttctgtatgttactatccatttatgacagcactatttctcaaagagatttccatttttcattataccattttggcttctttataaaaaaaatcaggtgttcataggtgtgtggattggtctctcagggactttgatttgattcaattgatccacttgtctgtatttatgccaataccaagctgtttttattattataactctatagtagagtttgaagtcagggatgcctccagaagttcctttattgtacaggattgttttagctattctgaatctttgggttttctatatgaagttgaatatttttctttaaaggtctgtgaagaattgtgttgggattgcattgaatctgtagattgcttttggcaggatttccatttttttattatgttgatcctacctacccaagtgtatgggagatttttcctctgtctgatatcctcttcaatttctttctttagggacttaaagtttttgtcatacaggtcttgtttggttactgttctgccaagatattttatatttgtggctattgtaaaaggtgatgtttctctgatttctttctcctcatattttttgttagattcaaggtatgtatcctaagttgtggtctttgatctttttggagctgagttttgtaaaaagtgacaaatatggatgtatttgaatgcttctaaatgtagctagtcaatttgatcagcactatttgttgaagatgctctcttttaagggtatatttcttgattctttctaaaaaaaaaattaggtgttcacttgtctgtattcttttgtctggaacttccatttgattccaatcaccaacatgtctgttgtgtcaacatggtgttgtttttattaatatagatctttaacaaatcttgaaattgaggatggcagtaactgttgcagttctttcattcttcaagatatttgacccatcctggttttgttgttgttgtttgtgggtctgtgtttacaaatgaagctgaacattctcctttcaattgtatgaagaattggaatacactggagcaatagtgtcataaatattgtgggagtaaccaactactgtctatttagacttaaggccagtccattgaatggaacccatgcctgacactgcttggctggccaagaacccaagactagagactagatagtccatggaactaggggtaaaacaattatttttttaaaataatacaacaatcaaatgactcctaaatcagtgtctccctcagccattctatgagaaatagaagggaattagtacagagacccacaactaaacaacatacagagaacaagagtctttggaatactcaattctaaatgagatatctctatcaaactcttccgttcagggattagggaacacttcagaagaggaggcagaaagattgtaaaagccagaagagatgaaggacaccaagtaaaccatgtcttctggacacaacaggactgatgcaaatatgaactcacagacactgtggaaacatgtacagagcatgcacagattcaaaaaagataaaatcctagtgatgaaaggtcaaagccgatactatatcccatccctaacttagaagctttctctaattgacaatcaattgcaaagaaaaaattagtgttctccaatgtagtctcacttaagtgtaggcaatatgtaggtccatgtccagcagtagactgctaacataaaatcaactaactcttgttttctagatttttgtgtttcataatgcattgcttcatttttgttgctgttttttttttttttaacttactggtgttttgttagtatatcatactttctggttttgtgtttttatttgctgtttgggaggagttgtgagggggggagtgggagtttctcatgacttttcaatgtttctttgttttgtgtaatgggttatttgctttgctttaatttttcctgtttattttctaaagagaaaaaaggaaaacctagagttggatgcttgggaaggtgaaaaggatctggaaggagatcaggaaggagaaactgattaaaatatattgtccaaacttttatttaaaaaagaaagtaaattaaataaaataaaaatattttggataaatttaagatgattaaagaagcacaaagaaagttctgaatttcaaacaatgttgaaaagttacataccattttgaaattttatttcggtctgtcctttttcttagtaagattttttttaaatggatggataattgataagacacacgatgaatggtttgtagaaggtttggaagacatttaaaatattgcaatttctttcagtatatttggcttcagtgtctggaaaatatgggaacaaagaggatcaagtcaactgttctctgtctgaataaaatggagacaatgaggaccaagtcaaatggataaagaggaaatgggacattgaaacaaagcaaactaatgaagcagtgaatttgcagtttgatgtgtttagctgaggtttctgcagcatgttaataactatatgcctcagtatagattttggaacatcttttctggattcagaagaatggaaagatgaaatattatggtatacacctgggagtagagcagcagagagtaaagacaggggatttaatggagagatggatgcatcctgcataatgctactaaagtaatttatccttacaaccacttgtctctgaataatttgacctattttaaatgttcagattactgaacatttgctctgatctgctgactggatttaaaaaaaaaaaaaaaaaaaaaaaaaaaaaaaaaaaaaaaaaagggctctgcttcagtttaaatgagggtaataggtcaggagatctacaatccagtctgctatgcattgatttaatggaacaatgttagagcagaactgattcaagcagaaggtgaatctaaaaatatgatgaggagaatcagatgaccacaaatagaaaagtagttcacagcaaaagaaagattgattaatgctgcagaaaggacaaaagagggatttgaagttgtggcactggaattctaaccaagtcatcatatgagaaaaagaaaactcatggtccctgaagagatgaggaaactgaatcaacaaagtgattcctttctttgtgagatttgattacaaagggagtgtttaagataagataatttgcagataagaatgcaaagctaaatgatggctctccttttattttctaaaagtgaaaggcctaattcaaatacaccaaaaaatgagtgtgaccctcttcaccatgtgtgttttggtcagtgtaacatgactaattatatcaactttatagctcatgacgctacttggtgctgtctagttcatgtagtagacttcaatgaaaacgtaatttcctctcatcacagggagggccacaggagttaaccctatggattcatagataattagaaaacaaagtattactctgataaggaaggctggcaagttaccaaccatcaccaccagttcactataaagttaatgaaagaaatgtgaaaagacacaatgtggatagatcttatttcataaggagtggggacacacacacacacacacacacacacacacacacacacacacacacacacgctgaggatgagaagtgagcattggaaagaaggaggccacatgaatgagtctgctgttactttgtacttgcgagcctctgatgggttttcagccagtactatacgctattggaatgttttgctcagaactgataatttgggaataaacaaatcaaagtagctgttgtcatctagtgatcttgttactggtacccaattccctgtgatgctacatttttattatatttgggcattgagagaagaaataattaaaatgtgtttcataatccatgcacatggtgtctaaaatcatcaaattaatatttcaaacaaaggcttcctagagtcaccgcttgctacagaaagggatagaggtttttgtaggtgtgttcactgtatcattgaccaaattcaatgacaccaatgttgtgaaaaattgttggacacacttcaattatcaaacctataaaaggggtttaaaatgagaaaaatgctttcatgctttatttgaaatctttaaaagtcaactgaaaatttatttgcattgattacaacattttcatatagatgatggagggaaagtaagatccttaaacatttcttgacccccgaaaataattattttctgtgtgtcaccataatcaatgaatatttttgaaatatattcacttgctttgttggggttttcatcagttactcatctgcaaatatgataaaatgttgtgacaaaaaaacaacttatggatgagatagtttatttgggctttcagttccagagagcatagtacatcatggtggagaagccatggcaacacacagaagcaggaagctggttgatcacattttcatccacacacagaactcagaatgagacaatgtagaaggtcagtccatagaccttcaaaaactcatactccagtgccatacttcatcacccagcaagcctctacctccaaagggttccataactttcccagtagagtcaccaacttggaacctaatgttctcatacatgagcctatggggggcatgtctcattcaaaacaaagcaagattctaagagccaattcaacatggacatcaggtgtgcttcagtaaaacatgagaaagttgttactattgttgaatatttttacttttataactgacatctgataatccatgttatgtaatctaaatagtactcaattcctgtgctactgacatacttatctaaaaaaaagactatttgccttatagcaatagccaatatcagcagaacaaagattaagactgagcttgagcttttaccctaatgcttacttcctccaatccatctggtcattgtatagattccttgagaataccctcatgtgatgccttccgagattacaatatgtgacatcatagtcttttatacatgtcaaaggataatactagtaattgtgttaagaacttactgttttattaggatgagattaaagtatttatgcatgtatttatgagcaaaacagtagcagttcagtgttgtctaggttatgactcctgagtacagggtaagccacatataccatgaaggttgaattataaaaacatcactattctatatggacatattattctgagaaagttccatgtctagcttccttaagatatctatttgatgatgcagagccttcagaaaaaggaagacatgctagtgtagacacccctatttctatgactgatctgaaaattagacttcacaccatggtaaacaggggaaatctaggcatttattttccatttaaagatgcccaggagatttcagtagaaaaaatatgacccacagaaagtgtgagaagcataagttaatggtcactttatgcaaaggatggtggtctagagggatgataaacaaagagttctaagacttgactaagagttgagtcacagcagccatgagacagaggcagaaggtttgttttggctttcaggccagtcttggcaacatagcgaatgtcagaacaacctgagctgtaatgtgggacccaggatcaaaaatatacatttttaagatccaaaaataaagaaaggtgctgatactagaggcagtaactagtgataaatggctaagaaacagattgaaaatagtgggacacagacacattcatagacccatacatgctcattacaaagtcaattcctaatttttgatactaaacaccccctctctcttggtatattgatagtgtctgtcatggctaagattggttgtcagcttgacagcatctgaggtaaacaaaacataagcttcttgggactattgtgaagtattttcttgatcagattatttgaagtaggaaaaccaccctaaacatgggctgcactttctggtgacaaatccaagaggatatggaagaagggaacttcaattttatcttttggcccacactagtgttggcaagttcatctatcctgttgcttcaccattccttcacaaatattagaatcaacttttggacttcctctgtagacagagaatcaatagctctccaggagtctccagccttccagcaatcggttgggacccctgagacatccagccccatggaccgagcaaacaccaaattctcatgttctccagcaagagaggacagtgttggactctccataccttaccctgcaaataatccaacaaacccctgttgtgggatatctccactgaatactataaatatgttttattattattggttaataaaaagctactttggcctataacaatgcaggatagttttaggcaggaaatccaagcctgagcaatgggccaaccagtttgtcattaatagtgagcctctgagtgaccaagcaggacaaaacaacctccatttacaaatccccattgaaatatacatatttattctttctgttcttttcttgagagagaagaaatacagcatctttctcataggaaatttgattacttgcttttaggtgagaaaggtcatacatgggaataggaattccttcttgaaactcaatttctcaagtagaagtagagacaagtaatcaacatcttaatgtgccatattttagagtggggcgatctggaaacattgaaaagaaaaacttatcaatgttatagataaagaacagactcccattcaggtcagttatctagcatctcagactgaaactgcaatcaatttcagaaaaacatctcagttgaaaaattaaaaaaaaccactgtcaaacaaaccaagtaaaactgcttagtggcatacttgtaactaatggcctccttgaatttggcagctatggtttccttgggctgagaatgaagaaaagggaatcttggtttgcctcttcttgtgacttgtgatggtaggtgttgtcatttgtatcacaaataaactcatgtgttaaaaaccttgatcaatcctgtgtggcatgacaggatctagtgaagaagatagttccttgggacccatgctcctggagtggtaatgaggactctagctcctccttggatctcacattcattacttcttaacaaccaagaggttatgaagccacttctcannnnnnnnnnnnnnnnnnnnnnnnnnnnnnnnnnnnnnnnnnnnnnnnnnnnnnnnnnnnnnnnnnnnnnnnnnnnnnnnnnnnnnnnnnnnnnnnnnnnnnnnnnnnnnnnnnnnnnnnnnnnnnnnnnnnnnnnnnnnnnnnnnnnnnnnnnnnnnnnnnnnnnnnnnnnnnnnnnnnnnnnnnnnnnnnnnnnnnnaggacaaagtcaactgttctccttaaatttgttttgtctctgatattcattatagtaccaaacacttaactgtgttcttttgtaaaattaatagaaaacaactgtaagaaaattaattctttactcatgaaaacagggttttttttatttgatttctttggaaataaatagtttcatgatatttttttatttgtaacaatgctgtatattaaagttaaaaaatcaataaaggctgtttacttggaagacaaaagtacaaagaacaactcgaacatagaaatatgacagtaaggaaaaaagcagtcatgaaaggttttgttgtgaagccagtttccacagtggctatgtggagcttctatacaatatgaaaactgatgtggaaaagtataaaatgcacaactaaggctgacctggccagaagccctaggaaaccaaggcatttctattccaacattttccagtccttgactgaaggtcattgggaatcaacaaccaataaaacttaaacaatgaagactattttttttcctgcctcaaagagaatttgtactgcagttatatccaacaactgactctttgtgttttatttcccagagctgaggacaagagaggttgtttgatatcctgagcatgtgatgtagcaaatagagactagtaagtttatgttagagctgggttctgtgtttctttgttaaaaactcaaataatggtgatgagagcttgagcacagggaaacaacaaaaccacataaaaatctcacttcctatgaattaccaatcaacaaatgggggttgggtatttgaaggaatcctctccatggtacaaaggaagatggatatgtgtgactggctctctggagtcctgacctgttgacatctttctcagagcactgagaaacagagactttggcaggcagcagagccccgttacaaactcaggattcattccatagagattcaattcaacccactgcattcccaaaggtttcactgcctcccccaaatggcaccatccattaaagacctggttttgagtcctgtgggccttgagtgcactgaaaacacttgcagattttccaattctccttttttgtttttattggaaactcattctgtgacattacaggttctagttacaacactaaagtgacaatattccacaatgacatcatgattggacagaaaagcaaatagtttattttgatactaataaaatttactatttgaaatatatttggctttttccttctgcctttaacattatttttttaatgatgagatgtaatttcaagaaagcatttggccacttgcatgagcattgggtgatccaggaccataataggttataaggcactgcagaaacaagaaaatgccatcagggatacagttgccaacactgattgaagacaccttgttttctggcctgagacagtcatatgattatgagtggcagtctgtatgtgacagacactgcttgagagatggtgtcagtcacaattatgacagagagcaaaatcagggctgccacacattacacttggtatttccaaagcagcttcatgatctgacagccactgaccttcttaactagattatttcccaaacagaaataattttatcatcaaaacaagatagactatgaaaacatttgagagaaacattatctctttaacttttactttgaagcagacatgcctagcctaatacccaatacctggatgtttctctgtgtgcacttgtttttttttcgttccttcctttttttttctttctatcccccatcatcctttttgtctccctttccttctctctgagtttatgagcctaaaatttctgtcataggactacattcagaataataaatccagaaatattagctctactttcagacaatatttgtcctatgcccaatagattctttatcacacaacagttgatatgaaaatgagatacaacttctagaaatcccaatgcaaaagaaaactaaaggccaaacctgagcatactagtgcaagtaaacttgacgagggaagatactttgactgttctcccacaatgacactactttctcctacagaaagtgaaacaacataggcaaacaggattgcttgaatacttcgttttaacttgatgcaggaacaatgaaggtctaaaattgaagccaagtcctagcattttttccaaggtggagaaggtcagttggcttttaaatctatttatttgataaacttttagtattttcaactttgtagtaaaatcactgaagggcagaagtacaggttagtggtatttaaataattttattatttcaactaaattaaatggcccatgtttagtaagtctgcattcagatctgcactctaagtaagagctccaccactaggaggcacttgcccaacagtgaggtgggtacttactaacactgctgtgtatccctgtgacccccacccccaacaccactctggaggcactagaaggtcagacataaattatgggaagttgttagcttgctcttgttttgcctcaagtatttcttgctaaagttaccttaatatttggcagcaaatatcatttaaatgtttaaagatattctgcaacactcaataaaaataattattgaaactttcataactgcttgtttccttgttcagggcatttctgctttcacaatggactatggtaagctgagtccaatggtacatgtttgtgatcccctcacaggagggtgaagaaggttcaggagctcaaggccagtaacttgaaacactgttctgcactcccaccagacaaatagcagaagaggataaagagagagagagagacagggaggggacttcaaaggtactttatcatatagaaaatcaaatgtcctctgcaaatggaagaaactttggaaagctggcagaaggtcagaagtatttaaatggaatggtttcatgttggaagctagccaggctggttgttctggaggtttatttgtcaagccttggcgctatccatactcaagtgattattcacaatggcctaatgttttaatatagaaacaaaacaggagctggctgttacatatcaaagggttgttctgtttccctgcacatatttttcctactcctgtattgtatttgtctttttcatgctttccttccttgggacatttaagtcttggatgctgggagcagcttctattaggatctatgagaagttccacaaaagaccaccattcacatatgcaatcagcaagagtgtttatttcctataccagcatatatgaggctatttgcttgacacaaatgcccatgaccctgataggagcatgtagtctctttttaggcacagctaagaagagtttcaggaacagtgaggccatcttaaatgtaattggtcaagcaagcatcagttacattagtatacttttaattgtgtgaggttttatctctgggcacatttgcacaagcttgggaaagtccagatgtgacctagaagtgagactgggggagggactgtaggacttatccttgagatattgtggggctgactgaaggtatttttcctgttccctcccttggcctgaatgtaatttgttgataaaaggccctttgtttggagagacaccagtttgtccatctcagagaactggaacttaaattcagttgtaaaagtgggagagtttaatcccttcattttctgaagtactctgaagactttttattcttctgtacaaatctttaaaagctagaagaggactaggggaatgcctcagcacacaaagttgattgttgcaaagttaaacctacgtggcagaggacctgtagctacagttggtataaacaccctgatgtgagtattgagaactgaatccaggttctctgaaagaatagcaagtattcttaacagctgaaccatgtctataaaccttctatataaaatttccttcagcttatatttccattaaacaataaaagcaaacaaaaattaacttttagactgcagtaatctgtagacatggggaaagcaataaaatatttttgtaatttgagtccttcaaaaaaacaaaaccagaaagggtagtgataaaatgactggtaatgacacaatgactgtgtgttatactcatagatcaatgtcttgaccaaccatcatcagaaaaactccttagtacaacagatggaaatagagacagagacccatagctagacaatatgctaagagtgagaaaccttggaacatttatctcttcatgggataccttcctggcttggaggaaaccatgaaaactaaccctctaaagcaacattatcaaagcatctatgaatggacagagacttaaacaccatgcacaggaaattcaccaggttctctccatgtttgttatagcttccagtttaatatttttatgggactcctgagtgtgcaaatgtaagggtgattgatccttgtgccttcttttgaattccttctgttggtttgttttgtccaattctaaagcattagtttttgttttatataattacatttcattctattatttacaattattataaagttctcttaacaataatctctgcttttacttacaagctttcactcatcactaagattgcctttagtaagaatatcctatctgttgtcgaagctgcccaaactagggtgctgtgttacagcaagctggaaaccaagacagaagtggagagaaaaattttactagaaactctcctggatgaaacactgttcactgtaacacaaaaaataaaagatccagagaccgatattgatgttcaaccttcaagctgaagatcagagaaacaaatagccaagcccctaactcttaactctatcccaggctaaaaggtcatcctggctccaccaaaccatagactgaaatctcagaatttctaagctctcctcaacagggctgtagaatcctgagacttcaatgtcttccaatcttccgtgtgcctggagaatgaatgccagctctgagaccctgttcctatcttaaatacctctcatgagtcctggtattaaaggcaggcatgtgatccaaagtgctgggatcatcttgttgtgaactgcttctctttaggactgggaacattttgtgtagctcaatgtggccttgaactaacagagataagtctacctctacttcccaagtgatgtgattaaaggtttgtactaacaaaggtctacctctacctcccaagtggtgggattaaaggtttgtactaccactgtctgccttctctagctaactaatttggctgactttgctttctgtaccctcaggcaagctgtaatgaatcataaataatatatcaccacagttactttagagcaccaaacagtcctgaaaacaatcagtgttgggctttaatcccctataaaatattgatttatgtaaaatagctaaattataaacaacttaaatgtttcttttgtaactgtttaagataagatagtctttttgtttactatagaactttttagatgaacttgaatattcacccaagttaattctttgggggattcatatttgcaaattacagtgaaattatattccctaaattagtttcagttatcatattgtcctgcttcccaagccttaactaaattacacacacacacacacacacacacacacacacacacacacacacaaacacacacaacactcatcattttattattaattttattattaatgtatattatgtagtattatgtataatgtataatgtagtattgtatgtatgtatgtatgtatgtatgtatgtaatgtataatgtagtattaataagggactgagtcctaaggaaacaacatccacagatgttcaggcatcttatataaaatattttacatagcacctacatacaccttcccatatactagttataagtagtctttagttacttgtgatatctaataaagtattcattttactgaaatagttgctatgctacattattgagaaataagaacaagaaaagaagtatgaatgtaaatctgttcattacaagtaatcaaaaaatatacttgatttaaggttggtcaaacacatggatacagaggatgaaatacacacacacacacacacacacacacacacacacacacacacacacacacacaaagtcctgtttaataataataagctattaaattgataataataattgatagttgataatggataactagcaatattttaaaacctatcttggtattccatggcacagtttaattgacacctatgaactctaaatcctgctatttcctgggaggcacattgcctattgaagtgtgaggcatggaattagtagccagtgtgtctcacaacctttagtttaaatatatgcagtaacttctaaacccaatgtgataagtaaggagcaaaatttaaacatttatcataaacaggaggacacataactaattcaaaagttcaggatcaattaagagttttcttcatttccacccccagaagagagggtggaagagtcagaggaccagagatttgctgtgagatttggtctcctaggaatatcagaagcaacagtcacagggtctcactaacatgacttgaacaatcccaatagatatggtaaagtgtagggggaaacacctatacaatgtaggaaacaccttcacagtgtaggctgcaaccctacataaagaactacagacaacaaaggaatgctgagagcaggagaaacagtcttccccttgttacccatttctaaagggtcagcctttaaaagatataatcaagtaggacacagactgagagtgttatatttaggaatatatatgtacatacatatatgtatgcatgtatctataataaattacaaaagagaccatgaatatgaaataaagaaggaaacaaaatggaaggaagtgaagggaggaaagggaaggaagaaaagatatatttttttgtttgtttttctgagacaatgtttctctgtgtagctttggagcctatcctgtcacttgctctggagaccaggctggcctggaactcacagagatccacctgcctctgcctcctgagtgattagcatatcaaaattaaatttaaaaaacttcatatccatttactcttatggtattaaatctatatattaatatcaaatatattgagatatttatgaaaacagttaaattatatcatatcaacattaataaggaaagattaaatcataatggagactaaaaaaggagttgtttgtaggaatattgagatgactcaggagtgaagagtgcttcctgattttccacaggacccaaagtcaattctcagcacccatgttgagcagctcacatgtcctataactaaggttccaagagatctaccactctcttctgtggactctggggccactgcacttgcatgtacaaagtcaccactcttttacacagacaaacatgtgacatgaaaaatgaaaacctagagacaggttcaagcttcaagctgaagatcagcgaagacatgcagccagccagtagctccatcctcagtgtgaaaggactgccctctcctcagcgtgactggagaataaatctctccaccaaccctcagactgcaatcctgtctccaccaagtctcagaatgaaagggtgatcaggctagctacaggaatctgcagactgcaattttagactgctgcctctcctcaatgtggttggatactaaatcttttaagagaccctctgtttcttccttttatacctccatattgctgggattaaaggtgtgtgatccaaagtgctgagatcacctttgtgtgagctgtttctctttaggactggattagtttcatagagctcagtgtgaccttgaactaacagagatctgtctgcttttctcttcagtcctgggattaaaggagtgtaccaccatcacttggctctatggctaactagtatggctgctaagattaaaagtgtatctcaccattgcctagccctatggcttgtggctaactttgtgttttgtacactcaggcaagctttggtaaatcataaagagcatatcagcacacacacacacacacacacacacacacacacacacacacacacactttaatgaataattaaaataaatttgtagaaaagacttgctctgttttcgtgccagcttcccctgtaatcccaggagtcatctagttggaagcagaggcaccaagtgggtcagaaaaaggcacacaaagctgtgggaattgcttccagattaagtcacaatggtggaatagcttgattgcaaagcccatcttagcagtatgaaaagccctcttttcctgctttggacacattttagctctgttttaataatcattatgtatattctttttcccattctatgattctagctgacaaaatccatgccttctaattttcttgaagtggattagttgtcctacatattagatctatagattcctgagtaaaagcagaactactaatgctatgattataaaagcagttaaaattccaaagtttatctgctacaaagttgtccctaccaagcatcagaggacacacctcggaagccagatcagctcataaccggctcttggaatctatggtgtgaagacaccaaaggttcactttcctcattatgtctctgtaaagatattctttatatattttaattaattttagttaaaacaataacatacatttatgaagcatgatgagataatacattattcacaatttaatattttctacagtggtactccactttatgtgatatatgtgtatcatgtgtttgtgtgtatatttgagagagagtgtgtagctatgcatattcatctgcatgtgtgtgcctctgactgctgcacagagactgctaaactcatgcatcattcccaagagtaacccacactaggattctttgttagggtctcttactgcaaaataagcctgaggagactcctttctctgtcttccagtgcagagattacaagtatatctcactataatctgcttttatttggggtgctaaggattggcctcaagtcctctggctgcttcagaattacttgactaacccagccctgtacatacacaataatggcatgtgcaatatcttttattcacacaattgtcatagcattggagatgaagactaactccacatttcaagatattaacctatgggaactggctacacaagtaaaagattaaaatagcatcaacttatagaattaactaatggtatagtatggatgataacatttttcttaaatggtgtactaaatcactccaaaaagcagtgaaaagtgctaccacattaggcttgctcatagttctcacatcagctagttgctggcaatatgagtagtatgccacagtcatgtttgctgtctgggattgggacaccctatcagactgtgtgtggaacagttgaaattgcttctgcatctctcatattctctactccatctctcacatgatctctccattgtaactattttagcatagaaaacatcctgagtatatcctcaagattcctatgctgcatggaagagtgaaaacaagcaacacatagcctttcgattcatggtttggctcagaaggcatgtgatgaccatcttaccagaatctagtttcctcagcagaactctgtccacccctacattactaagagaagatatagatgtacatgtctttgaggcatgaagtaaagttccccactgcaaagactagcaagtttttggaagtttaaagggtgatctcactgggagaactacctggtgatgcacacatccagtctacatgctgactccaaaatacattgccgagaatcaaatgtaatgtcatccccatatgtgacactgaagcttgattcaaggttacatggcagcactttcctccaggattctacttaatgatcagtgttctttgtgcaattggctattgtggccactcatcacaaatttctactaaggtcttaaaatatgactgctgcaagccaagaattgaatattaaagtgaaattaatgtgaactcactttaatgtaatgtaaactgtaatgatatagctagtgagcactgacaggagatgtcattctgtaaatatgtctctcttattgggtgatgaataaaacactcttggccaataggagagaaagataggtgggactaggagacaaggagaattctgggaaatgtagtaggaagtcaccatgtgatcctgggaggtgaggaagcatgagtctggctttcacgttaagataaggccttgtagaaaaacatattagtggttattggttaatacttaaaacagagctagcctataagaaatcctagtcaccagccaatagcttataattaatatagtgtcttctgtgttatttgggggccaaaggggcaatgggactcaggtgggaatccggtaacaaagtactaatttttcacagcatagccattatgagataaatttaagatttgaaatgcaattgatgccaatttattccaagtactgtggtacttcttttaatgcaacaacaacaacaaaatatttagtttaaaggattaaatttccaattgagatgtttttgctcagactcaaaattgaaaatcatttcatttttttgtgagcaaagacaatgcaaatttggagagctttgatatacaatgtctactattaagtgaacactattagctcatctagttataggagtcaattttgtgtatgtgatgcaacattaaaaaaggaaaagctcatattctccaagaagctagataatcatgaaataacaaaaacgaaattaaagaggagaaatcaagattatgttgaaaccccttgtgtattatttctggtctttaaatctgatgatttaaagttatactgcaagcttttagatgaggttatactgcttagaatgtgcaggatttgtatcacctgtgaaatagtgttggtaattaatacatgtcagatgactttctctgatcaaggtgtgtcaaagccctttttggaactgtaaaatacagtgattctcaggccattagtgtgaaacagccttcactaagacttactcttataatggaaacatcacagctcaattttttaagggattacatttcctgaatataatatttattctaatatgaatactggacagataattttcatcacgggacctttaacatatgtgactgtacacatgttggtaagaaggtaatacatggagtgcagcagggaagagctccaggttttttcaatttcttcttttctcatccatggaatctgattcatataattaatcattttatgttgaactagtgaattcctttcctttttctaaatgagaagtgaagtttggaaggcaggatgaaaagaagtaattaagattctgtatattctgtgagttccaannnnnnnnnnnnnnnnnnnnnnnnnnnnnnnnnnnnnnnnnnnnnnnnnnnnnnnnnnnnnnnnnnnnnnnnnnnnnnnnnnnnnnnnnnnnnnnnnnnnnnnnnnnnnnnnnnnnnnnnnnaatggtggagaggatttccctactgtttagctaccacaggcccccttaggggaaagggacacacctgtgaatgcagtttagagagacaaacacagcatgggagaaactagagagcttggcaggtagtagcattgaggttcaggactgcatattagtgttccctgctctatccagaggtgaagaaagaaaatagaaaaaaacaagtgaaaatgatcccatgttaaagaagtctgcagactacatgttgtttgtttctgagaaaacctgtctgttcagtttatgaaattcagtaaatattgtattcaaagacatgaacaaactcttggtaaaactctgcaattgcctgagtgaattgcctaacacaagtcaattcacctctgagacttctaatctaggtctataagaagagaatgacattgataataaaattgctcccactcaagaaagaaatgaataaagcacttgaatgcatttgttactctagagagtggctttgcaagcatcactgggcccgagttgcctgaagaaacagtaaggtcatgattttaggtttcaggtgagtgtcagggacaaaggctactgggaacttcaatggcatcatcctctctagtgaacagggcactctataacacacacacacacacacacacacacacacacacacagagagagagagagagagagagagagagagagagagagagagagaggcacaaatgcatgcatgcgcacaatttgcataagaaatgtagggtaagacattatttggaaatacgggctttcagatctgcaatatttaagacataattttagatgagacaggtaacaagaaagtcttcattttaaaaagcaacagatgtaagagatctatataagggaggctattgataggtttgtggggcatgagtgccaaggttgcaactaaccactgaaattcagaaaagagacaagagatacatttgcccttagagatcctgatggcattggagcccactgatatcttgactttgaatttctgactgcctgaggtacaagaaactaaacttctgttgcttggagttgctacatttagagcaagtagtaaaggcagctaaagaaaaccaaataacagagtgagtctgaaataagaaaagcaagacattgaagcatgtcactcagaaattaaagaatttagtcaagccaagtgaaatttatactccacagggatatcatcatagcctttacccaggaagcaattacaacattagtgggttccatagttttttgttttggttttgtgtttttttttttgttgttgttttttgtttgtttgtttttgtttttcaagataggtgttctcagtggctttggaggctgtcctggaactagctcttgtagatcaggctggtctccaactcacatagatccctctgcctctgcctccagcttgctgggattaaagacataagaatttattggaatatttatcagcatggttggcatattcatggcagaaaaaccctctttattttacccttccatatatggtagaccagatctccctttagagcattctttttctttttttctttctattttttctttttcttttcgtttttttttttttcaagacatttttattttgtataacagtcctggctgtcctggaactcattctgtagaccagactggcctcaaattcacagagatatccctgcctctgcctgaatactaggattaaaggtgtgagccaccatgcctggtgagaggaattattctaatgaccctgatcctattgaaaattcatgtatactgaagtttccttgattactgtatatctagttccttaacaagtttacatcattctactctctactaagccctcatcatatttaattggaggcagggcagaagcccccttttttaagtgacttccaaaggctgagaatgtccatagaccctaattacaaacaaatattccttctttgtgtgtgctagttctgaaactaaagctagaattactgaggaaggaaactttctaatataactgatgtgatattgaccagaggttgcagtagggtttcatttcaattgttccagtataggttatagtgcatgggacctgttctgaggtaaatggttcaatatatttttggtacaaccttttgaagctgaatttgttgaaatctggaagaagcaaaacttcttagccattgagggaggcagaaacaatctgcataagagaggcaagtcatggttatgccagttgaaaaacatgagcagaaaacctgagaagggacagagcagcaggctgggtatcaagtctgtttttaatccattaggaaaaaaaaaaacaaggaatgttagacccctggaaaaactcaggtatccggggccccaggccacaacctcagtcactccaatcaccaggcagattcgagagcttgctgcaaacttcatgaggctttattgtaatttaacaagctaaccccatgttagctctggtcttttgtccacccaccatggtggttggctacaaaagacagctcctaggggctcccgagagatcttgtagggcagcgtaaggggcgtgtctaggtctatgcactggctcaggattggtgtgccctccaggcttggagggcttgccttgtgttgattggccaactggttgttatggcccataggccctcccagggtggttgatatgctctgtgcgtcattgctgggcacttgtctgtaaagtaccaccagggtcgtaaagcatagtgccaccagctaacttctgattggttccttgtcacgaggcaagcgtctgacctctaagtgaccaaggcaaggttagtgtcatggttgccaaaatggggagctggtcccttcaggaagaggggaacccatgtcctgcagagtggctttgcattgaagatttaaactttattttgttgttgttgttgttgttgctttcaccccatgcctcatatgtaggctgagaatccaggttgggcactgctaaataatgttttgaaacaacacatctaaatatcaccactattttttttttttttgcttatactttcctggttgttaagcacctataagaggtcacattttaaaccttcccccacaattaacttactaaaggcttgtcagatgttatttttagggacttaggtggaaatccttaatccctcattcttttaatttgttatctttaggattgggtccagatattactaatcttctggcttcctttggaagcaaaggagattccctatccctactctcctctttgcaatatgtactgtttaaaatctgagctttgagggtctctatggccttagtcattgagataatgggtcactttctggaatggtggaatctgttatcccctgggtcttgtatgacctgaacaggcaaagccaaacacattggctgtgtttttagcaccttatcttcatagcatcaggccaccagctctagctttaaagacaatttaaagacaacttcaaattcagggaggaattacaagattttagttcttttgtatacctttcaaataagtttaaataataattttcactttttaaaaatacacacttattaaaattcagcttgactttgtgttctctggcaacataaaaaggacaaaatgtaatcacatgtcaacaatcacatgtcaaaaatgccaagtgagtggcaagtagaaaagtgactttgctcttagttttcaaagtaagaagtgtctaactagagattcaaggaaattttgcatgaattgtgtgtgcgtgtgtgtgtgtgtgtgtgtgtgtgtgtgtgtgtgtatgtatgtatgtatgtatgtatgtatgtatgtatgtgcaagtatttgcagcatgcaagtgtctgaggcagatgcagaagtactgtgttaccattctccatcttaccccttgagagacaaacaatcttttactgaacctgtacctacaggctccagaagttgagccacctgcactcattggaagaagacagagtaagaacacacttgtgggggaccgaataattctgttatggaatattttggggcccagtctctagctcctgtaaaccagggcaccggaaagctctggctcaccattgtattgctaattgccagtagggctactattgtttaccatgacctcagggtaatatgcctcctaatttgcatttctgtagcttaagccttgagtaggcccatgcctgggctaaggactctgcctacatgaccaagagttgtttagataatagaatcacttgatgttacctatatacattataatagatgcttcctgatgttgtccctgcccttggagaactatttaaatggacttctcaataaactgtggctgctcagcatcagctgggagccctcctgagatgatatggtgtttcctttctcatcattaccttccttgggtaattaaacttccctagtccacacacctccactcagaattggactctgtccattcacagtcctgaagacattggtctggaacaattggcgccaaaatgtggggctgagtatgggggacagatgtgatggacaccgcagaaaactagaagagaagcacgtgcagaaagaagtgatcaagactgaatgacaccagatcaggagtaaaattgtatataactgtaaatatgggactaaaaagtagcaagcaggtgatggtgcagtcacttagcaagattttgaaaaataaaggatcagaagttgagcagcaacacatacaggattttgtagaatttgtaaagcagatatggcctgagtttcccaaacatgggaataaagattccaacttatggaatgaggttggattgagaatccgacagcattattatgaacagggtcctgaaagtgtatctacagatactctttgtttatggacaagcaacagaaaatatcttggggtaacactaaccaaaaaagtgaaagtcctgtacaataagaactttgatactttaaagaaagaaattaaaaagataccaggaaatgtaaagatctcccatgctcttggataggtagaatcaacataataaaaatgtcaatcctgccaaaagcaatctacagattcaatgcaatccccatcaaaatcccaacacagttcttcacagacactgaaagaacaatactcaactttgtatggaaatataaaaatacaggatagccaaaacaactctgtacaataaaggatcttctggaggcatcaccatccctgacttcaagctctaatatagagccacagttctgaaaacagcttggtgttggttcaaaaatagacagatagatgaatggaatcgaattgaaaaccctgatataaaccaacgcacctatgaacaccttatttttgacaaaggtgttaaatctatacaatggaaaaaagatagcatcttcaacaactagtgctggcacaattggatttggacatgcagaagattgcagatacatccatacctgtcaccatgcacaaaacttaagtgcaaatggatcaaagatctcaccataatcccagccacactgaatcttctagaagagaaagtgggaattacccttgaacaaattggcacaggagactgcttcctgaactttataccaatagcacagacattgaggtctgcaattaataaatggaacctcctgaaactgagaagcttctgcaaggcaaagaacacagtcagtaagacaaaacgaccacccacagaatgggaaaagatcttcaccaatcccacatctgacagagggctgatttccaaaatatataaggagctcaagaaccaagccacctaaacaccaaagaatgaaattaaaaagtggggtgcagaactaaatagagaattctcaacagaggaatctgaaatggctgaaagacacttaannnnnnnnnnnnnnnnnnnnnnnnnnnnnnnnnnnnnnnnnnnnnnnnnnnnnnnnnnnnnnnnnnnnnnnnnnnnnnnnnnnnnnnnnnnnnnnnnnnnnnnnnnnnnnnnnnnnnnnnnnnnnnnnnnnnnnctctctctctctctctctctctctctctctctctctctctctctctctgtgtgtgtgtgtgtgtgtgtgtgtgtgttatgtgtatatgtgtatatgtagaatctgtctacctaaagatctagccatacctctcttgactatttacccaaaaagtgcatgttcataaacaaggacatatgttcaaccacgttcatagcaacattgtttgtaatagctagaacctggaagcaacctagatgtccctcaactgaagaatggatagagaaaatccatttacatttatacaatggagcactactcagcagaaaaaagcaatggaatcttgaaaatcgcaggcaaatggatggaactagaagaaaccatcctgaatgaggtaacccagtcacaaaaagacaaacatggtatgtactcactcatatatgaattttagacatagaacaaaggattaccagcttctatcctcttcaccaaagaaactaggaaacatgaaggactctaagggataaatggaccccagaaatgggaagtggcatgaacttctgagctaattgggagcatgagggtagggaagagggagctgccacaataagagcaggagaagaggagaggagaggaaatggaggagcagaaatattgagttggggaagaatagaggagagagaccaggatgagagatatcatattagaaggagccactataggtctgagaagagatctggaactatggagatctccagagacttacaaggatgacaagatctgacaatccaggcaatggtggagaggataacctaaaagcccatcccctaaaatgagattgatgactactcttagtgccatcctagagccctcatccagtgctgatggaagcagagacagatatccgcagatatacactgagctgaaatctggaatttagttgaagagcaggaggaatgaagatggaataggtctgtaccaggttggagaaacccacagaaacagttggtctgaacaagggtaaaaaaaataaattaaaaaaagaagatacttcgagagcccatcccacgtgaagggatgcactcttgccctgggcacatagggaagggcctaggcccagcccaggatgatttggtggactttgtggagcccctgtttagggccctaccctgcctggtgggtggcgggtggatggggtggggcgtaggtcagggtgggttaggaggggtgagggtgaggggagggagaggaagaagggattgacatgtgaaacaaacttgttcctaatttgaactaataataataataaaaagactctggactcttcctagtttaacccagcaacccatgacaaaccccaaaaacataaattgaagaccccaaaatgaaaaaaaaaaaaaagcatttaccacttgggtcttctggcacagacctgtaactccaactacttaggaggctagcgtcagagtagcacaagttcaaggtcaacctgagaaaccagtttcttggaggacttactttcactcaccattatctgatgcctgcaaacctctgcattccccttctgttgttatttagcttgccacttcactcataccagctctgaactttcctttcactaaccacagtctcattgctctttcaatgaaagagttacataggcattttataacttttccttttgagtgctcaaaacagattaggatttatttgaactcaagtacctggcactagggctgaatgacactgtcttctggctttgtctacccagagatataaatctgcagacaggcttttgtagacagagaagtatgtttagaactctatattttataaaacgaaatgtttctattccacaaagtctatacagcatagaaataaaataggtacaggcataaatgcatgtgtgcaccacccagatccagcaattttcttgctttgactttgttgtgatttcttgatttcaaagacctaatgagaaatcatctccccagcacagctgctcaagtagtatgagaaaataaagcagaggtggtctaacatatggtgttcaacatgatgctggttcaatctgagctacaaaataggcaatcttactatccttaatggcaccactaaatagcaattacagaacacattcaggtcatttcaagactgtccctcctggagggctgtctatacacagtcccatctgtatccatcacaaatgtggagtatatgctgttttaattagttcataaataattcataacagggcaagtctctcattccttaaggaatgaaaaggaaaatatgacccaaaaggcaagtagtgaatgatttaggtaactagagggagtagtgtactctcaattttaatccaagttcatgattatgagtaagatctattaatgctctaaaaaagaaagttgcattaaccagtgtcatattaaaattaagttttatttgagtataatgggcttatttaaaccattgtttcaaagtctaaaatcctagcagcaaatatcattgtttactgcatctctctctctctctctctctctctctctctctctctctctgtgtgtgtgtgtgtgtgtgtgtgtgttatgtgtatatgtgtatatgtgtgtatgtgtgggtgggtatgtagatatttgaaagagcttcaaataaatttaacatatgccatgcaagatgcctataaaccattgcagaattttaaaatgctgtttatgagtttaattccacccacatacctatttgttttgcttgtatgatgttatctgtttctaaacttgtctttaaagtattcaaaatttgaaaagtaccagttgtcacataatatgtctcaattctgacttcacttgggaaatcaggtatcctcaatattttatctcactctaagtccctgtgaatttaccaaatatgaattactgcactccaacagtcactcatattatctctaactataatgagaaccaaattcgtttatgctggctgtctaatatttcaagatagtttgactgaacctttcttccaagaatcttcttgcttgtaacttccagttagataagccatttctcttatcggagatttggaagtaaacaagtaaacacatttgagctcacatagattaaaaaacattctcagtataaaggagtaccttattataataactctgtcttttcttggatttctagtttctccagcttctgttttcaggtgtatctttacctttgtagcagagggtgccaatttctgtggtatatactctgtggtaatgtattatttattatttactgaagcttgcctgaagattcagaaaacaaagtagtcacaaaccaaggaagccaggcactattgctggatttttcttgtcctgccaggtcttgtggcctcaactccaaatgaacacacagagacttacattagtcttataactgttggccgatggctaagccttcttactggctagctctgtcttaattattaacccatttctataaatctatgtatttaggggggatagggtgagggattggtgggggcagggaaggaggagagggagctgagattgacatgtgaagcaggcttgtttctaatttaaataaaaaagggaaaaataaacctatatatttccatatggcctgatcttactagagaatgcccggcacatcctatcctttccatcctttcatcatgtctcccttggtctacctctgcctacttttcccagaattctccttgtgtcctagccccacctatcttcctgcctcaattggccaaagagtgttttatgcatcaaccaataaagagaaacctatatacagaaggacatccttcatccagccacacaactttaatcccagcagccagaagttaggaggtggtagtaatcctttaatcctttaatcctagaactcaagattaagaggtagacagatctctgtgagttcagggcctcccagatctacacaatactgaatcagtctaaaagagaattatggctcacacatttaatcccagcactggaggggtatgcaatacagcagcaagtaattagtaggaggtattaattctccagccacactaaaatgaggcattggtacttcagtcacactgaatataagaagagtcagtatcaaagaggagaggaacacattgaaatctcaggattctccaagcgagctgaggagaggcatcagtttgaggcatagtgaagagcttgtgtgtggatcagccctttcagcctgagtttgtggttgagagctagtggttagctgctttgctttgctgatcttcaagttgaaccccaatatcagtctctgggtcttttatttttcatgttaccaaaaacagcaagcccagacagctttcagtctgccctgatgtcatttctgttcaaggcttctgtctggtcttttctgatgactagttttagttcctcttgttggtgcgctccttgtggtcatcacattctaacatcagatgggaagttaggaggacagtattcctggaactcagtggtgagtgagtcaacacaatagcataaatttaacctttgatatttgattttcatgattgttacttaactatactctgaaaacaggcaacaatgtatgagcatcaacagccatacagaaatattaaatatctttgttcttttaataactcataaatttgaaagcttgtattttcttatacattttacatttttgtttttttggaaatactgattttttagattatttataaattgtccaggctgtaatgataatcaataacaacaacaaccaattattgttcatcacagaaagcagagcaagcatatcataagaacttatttcaccctgtagacaactcttcttttatgctacaaggaaacatacagtatatagaaaggcagtgtgtatgaatgggtccaggtggtctacctgacttcacagatgacagaatgttttctgaggggatcatagtttgatctagtaggacttagaatattcatgcagttttttattctattttttccttgaacatgtgagcttttgatgtgtgataatgtattctttggctttattgtgaaatatctgttatagtaggaaaacagagatatttaattataatcatgttcactcttaagtctatacatgagattataaagagttcttatctctctggccacttttgtttactagataatgactgctaggtcataagagccacagagccattcctggaggtaaagtgttatcattcataatgcttgatgtctctgaagtccatggcacttggttgatggataaaccgcagcttcatgactcctacctcccagaattgtttctggactccccagttaaggcttgtcatttcttcttgtaatagtatacatctagtaaatgatgaaggatcattatacaaggtaaattatcatttgcaaatcaaaggtcctctccacgtgatctctggaaacagtatcatgtgtttgatatgtgacaaatcccactaatcagccctgtgtgcctattacctgaacttagcttaagtcacactacagaaattgcagggatttccactgatgaaactgtaaggagaacagtttagagttcatttagataaaataaaaaggtattacaatgatacctaatcaactgtgtagaatttggagaaacaaggacgatagacagagtctgaaaggaaatatagcaacacaccacgagctatgtgtgaaaagtcatggcaatcatgacttttaattagctcaggcaagaattttctattgttctaaaattattattgtattccaccttctctattgcacaaagctaacaatactttagtatatattgttctttgagcagaactggatgaatttggggtctagaaagaaaaattgccagaatgaccagaaagagagatattaaaaataaatcattcactgtctatctggcttttggatttatatgattatattaagaataaagctatgagggaagaaattagaagagagcaaatgacactttaagtctttgctggaaaccgtacttgaagtcagagtctattttttgaaaactgaaactaatttgatttaatcatatgatcccatcatttacagctaaaacctctgcacatgccatacatcccagaacatctcagtgcatctatttaattcactcagatgtttagttctctaaaatggaatcttgtaaaggttggaaatcataaaatacgtgaatattaatataaataaaagattgcccatatgtctagcacatttagctgaaatgccaccatattcaacatagtacttaatctctagaagagttcattttaaatattgtttagaaggatagtttcaggacaaattttagtagatgaaataaaaagacaaaatcacagaaaaataggtattgtagagaaccaagcccttgtatccttccccatgttctctagaaacaatcccctttgaggtcatggaaactcttatctaaactacttagataagatatactctctggatagttattcctttgggatacactacaggtaagttcaaatgtctgcccaaatattcatggttttgaattccacattaaaacttactgaactcaagttgggctatattaggtttttataaactaaaccagtaaaaatggctgtattgtttcatctttatgttcagtcattaaagttactcagagatgttcttagttcactctgagaaatctcactagagtttttgtactagtatacttcattcttcaattaattacctgagttaggctatattcctgaagaaattaggtttatttagttttgaggtctaaagtccatcagtatggaaaagtcagatgaggtttccaggttagatgacagaccacacacagaggaggctgttaaactttgagctacaaagtaaaagagactgggatggtggagaagcttagagttttacaacttataatcatgactcatttactgccagagaccaatattcttgcgtacaggcagcacctttaatagtctaaccatgtcagttcttaggcattctttctcatagtacttccacacagaaacccaagctttgtacattaggccactctgagaggcatttgaattattggagcaaactaggttttatcactccattaaaaaatagaaagtgaaactgatttgaaggaacccagaggcagaaagacaaactcagtatgtattcacccataagtggatattagatgtaaagcaaaggataaccagactacaatccacagctccagagaagctaggtaacaaggaggaccctaagacaggacacattgatcaccctaggaaggaaaattagatgagaaaattccctgggttaactggggaaaggtggggtaataaaggcaaggggaggagggagaaaaacatgatggaaaacgatgattgaaattgggagagatgaagagggagagcaataaaagagatatcttaatagagagagccactatggagttaagaagaaacctagtgctagagtaattcccaatgactccagctaagactcctagtaatggtgaaaaggataccccaaactggcctactactgtaatcagattggtgaatatcccaaatatcatcatagagcctcatccagtaattgatagaaccaaatgtagagattcacaaccaagtacaaggccagtcatggtttatattttgtgttccatggagcaacttatgtttagaaattgccttggcttttggcttcatccttctgtttttagagttttctttgcatggtatcatgataacagtgtctacctgtgcaatctaaggcaatgccttgaaattgcccttttatttagaaaacacattgaccttcaagtttcaagctggctgttgcttttgtgtgtcttcatttactcaccctgatccattgctctctgttgaagtctggactatgtctcccctgtcttctaatccctcttcttgcttctaattgcccctactctctgggatctgtacctggagcaacactttcatataaggattggattttatgcatctcgttatgcctttgcatgtggtgtttgtaatttaaactgcctgtgggctcagtgtgatatgaatacttcaccaggcagggaatgtctgcttttactggaaattcagcaccatggtccatcatggtagaaaaacaccctgctaagaaaataacagtctgctgtttgaactttatctggctgattctattcctgccatgctacttgcactgcccttatgtctaaaagaatgtctgattagtcatcttgattctggtgccaggtgctttgctattagatttgtgcacctggctgttccttccataatggaaaggaggatgagtgggttggtcagtgtctatgaggatcccacaagtcagtatttgtcgcatccacccttgaccagcaagaacgacgcaacaccgaggaatcttcttcacacagtttattcgggaaccttgatttacagggagtggtggccccgggtagaggaagacggggcctgatatagtctacatctaccaatcacctaaccctacgtagcacgccacaataggttgtctccaagcagaattaagaggatacgtggcctttaccaaattaggagttgtttaccacagagagcactcgccgtcgggctgggggaaggcagaaactggcaccatcttttgggcatggtactctgcagctcccaacaagtattgtggagaccattaggcatatgagattttgatgactgtgacctccatgctccttcaattaactgtagtggtagagatttgaaggtcaagaatgataactcagattaaggtcagtcttctgaaagactaatcttttctgactggagaaagtcattgttctaaaatgtttattttagtgtgttttaaattaggtgtacatatgtatgtctctgtatggatacatgcacatcagttcaggtgaccacacaaggcaaatgcatcatatcccctggatcaggagacctatgaacagctagctttaaatgcagggaaccatattggatgagcactgtgttcttaactgctcatttatctcctcaacacaactgatagcatgtatttttgttgctgttgttaacattttgtgtttttacatgtgtgtttgtgtgtgccacatgtttgccagtacttagggaagccagaagagggtgtcagataacccagaattggacagaggttataaactgtctgatgtttgttcacggaaacaaacccatgccatcttggagaaaagctaatgcttttaagtgtgaaatcatctctcactagagaaagtcttatttccctccaagatctttcaagtcacctatgtgtatgcatgttctaggctcagcattggcatttactgggaccaagtgcattttcattccttacactaattttcactgtttcactatttcatagctatccaaaaatataatttatatactactgcatagcttttgatactaaaattcttttattctggatttgggttggattttcttatcagtaaaaaatatgattttaaaattaatgctgaacaataaaagttggaaatgagcaatttggtaccagcacagcttgaactctatccaatttagttatcaatgaaataaaagcccgtattattgtagagttccaaccttcaggtcatccctattgaaaaggacttccaaatggcacagtgatgtgcgtcaaaaaccttgagaggctcacccccaacatctcttacactgaatcagaggaggagggagctggtgatctgggtgagtaacagagctctgccttcttagaaaagccttcagcactaccttcttgtcctttccctgtgaagccaggcagcacaggaacaaacataccctgtggcaaaatcttggttttattcacaagaggcctgcagctcccaagcacttaaacaccttcaaacaaagaggtttgtccttggccctttgaggaaagagtcatacagatggagatctcaggcttattagtgcaaataaagctgaattacaagcagcgtatctggtcattttgacattaaactttcagcaatgccaagagccatctgggcatcttcccagacaattacccccattatgtcaccactttccacatgaagggtattgctatcctgtgacattgactagcattggtgggcagtttggaaacacattctctgtagtgacgccctgtaggtttaaaccttggaacaacatggatatctttactctatcaataactaacttggataagttcaaaataaactgatatcaagctggttgcttgttttgaattgttaccatgtaaaacagatctgtggatgctacttttcattcttcttacatctgtatctgaattgagaatgtttaactgtctatccagaatcaaaacatgaaaagatcatgtgcagaggaggtgtaaactattttagttcaccttcattgtgtatctaccagaagttaaagtaggtgcctgacactgagaaaaactggaggtggtccaagaacacatgcccaaagttaaatgtcattagacttataggaagcctcagactgaaggaatctcaaagccatgttgtgatgctagcaatctgaatgttatttgtagttttaaatgaggtcaaccacaaaaatcacacttagattttgttgctattgagtccgtgcatttccataaaaggttgatttgggagctaaaggtaaagtcagagtaatgtcaacagtctgggacatttatattctgacttgagcccaaagcaggcacctttgagtttaacacaatgtttgaagaattgtattttttggtcatcttttaaaaaccttttgttaacttttattgtaatacccatgcctatgcaaacaaagagtactactggtatccaaatcctccactaggtgattaaaagctataaaataatacattcagggcaaaagtattctacgtaaagaaatgtagacacatagaagctatgaataaaacatcaacaaatattatgcaagtattgattgacagctttcttgttttgtgaatgaaacttttatgatgtcataaggatatcttttcacgcttgatatataaacatgctaagaaattaaaatttatatgaaagctatgcatagttggctttcctccagataactgacagtgttatgcttttttgctatgagagtcatgtgatatggagaacaataaaacaaaaggaaggagaaaagaaaaaagaaggtaccacttaggactaaattttgtctagtcagtagataattagtcaaaagaaatcttttagcctttaaaccacaaataatgtattggggattaattttaaatactgttaagtgttttggcattgtgttgtggcagtgtacctttgtgggcttctgtgactttgttccaagttcttaactgtcactgttgaaatgatgttgccatgccttgcacagtatataaatgggtgggtagggatgctttctaggtaaattactttttctgaagagcatctttcttgggtaccaaagcttgccaatttccagcataaatttcactttagtgaaaagctggcatgtgatatacaaggcaccttctccaagaggacaccaggcatttgaagactaaatatagtgtttattccaagttatccaatgtttagttgtataatattaacaagatacacagattttaatggttactccgctatagcttagtactcaaatttggcgtagtcatttctaaatggaagcatagatagggtaaaagagaccatgaaatatcaactagatgaaatatattgatccactaaatttttaatcacaaagtactgggttaacattgaaacatacttgaaatgtaaaatcaattataaagaactaaatgtaaagctatgggaggctgaggattgcattgtgtgcagaaacagcctgtgtctatgaggactgtcaagttgtaataagagagtcagaaaactttacttattcataaggacaacttgtaatactattgccatgattattaaaatattatttcctgaaattaaggagaaaacacaattttattacttgaaacccacatacttttatggaattttagccagtccttttaagtagacaaaataaaagaattggatgtttaggttgcattttattcagaaatccaacaatctcagaagactgcatctacatcctatatatccatcttctgggtcttatggctcatctttcaccagtgaattacagggcaggtggtgctggttgtgagactcagcccaaaatttttaagcttggccttctggtagggtgtcagtcttgtttgtgatttatgtcattggtactcatttccttgttgtctctctgcagcaggcaagggtttgcaaacacaaaggtactgagttttcctttcctctggaacctgccatgtagatgactggaggttaactcagaggagacagggctttatcaatgtttatgtgagattctttctttaaagtgaacaatgtcccacagatcccgggcacaacctgatcaacacctccactctctaaaggagggttaagaggtacagttggaggtaatcacaactactcaggttttatgacacaatggccatgcctagagtacagtagtccactgtaatagctgagaacccagcagtacttgagaggcatgtatggcttttgtactataactgaaaaggcagggaggaatgaggattctggaaaattacctttattctcttgtccagttttgatacatttaaaacttaaagatggtatgactgttaaagaaaaaaaggaaaagcttctatggaaatgagttaaaatgatttattctttagtttactcattttgaagagtaattgtgcattcttaaacaggaaaaaatacactttgaaaaacttcagtttgcttctggactattttgtcttctgaaataagtacaactgttactttccttttttcgggagaaactcagtcatttttaacaaactaaaaaattgtatgtggagcaaaaatgtattggcatctatataaatattctttatgctactttcaaattcttcacagttcacatattatcctgttaatttgggcagtgaacatagcatataaatatatttaatcagtgtccccaatcgatccatcagtcttttctcctgttcctgctcctctgctatgttttctgatactccctccttgacaccttccatttggcttttgtcatgctcatccaactgaaagagtaatgcctttcagcatcactgtggctgcatgcccaagtctacagcttaatcccccttcttatcctttctgaagtagtcagatgtacaacaggcaattctccttcaagctctaaaaaacaaacaaacaaatgaaaacaacaataaaaactatgtaagtaaaatgaaaatgaatttactggaaagttatgacatccgtaccactacttaatggcctttctggaagcattaggagtagctggaaaagtgatgagtgccttgaaaagatagtttcagaagattttaaaataaagacaatatgctttggaaatttctcttcagccattggtatattgggtgattattatctgtgatgtagtctattatttgtctaatgtaatcctttaaagcatgtttaattggctgtgtagatggctttgtagattgtggggaggtaagacacttaaaagtaacattttgggaagtgagtagatggcacagtggcccagagaacttgttgcttttatatggaacccaggttcatttctgagcaccaacatagtggtttacagctgttagtaatttcagttctgataccctgactcctgacatcctcttgtgtactcctccagcacctggcatacactcagggaatttacatatgcatacacagaacactcacttacttaaatttgattaagtaaatctaagctaatgtcttctctagatgctggtggatggcttccttggtgagatgcacaacaatggctaaataaagagagaatgaagcctgacagaccaaggagtggtcagcactaaagatggtgaatcaatgagactgttggggctacttagagatacatactgatcctggcaagttcatctccctaaggcccaccatggctgaagagaacacaaaactgcaccaaagagtattatacatcacatgaaaaaatgcagtgctccaccctatcccctgtctgcaccccgatgctccctaactttgggtgaactgtctctccagagggtgaggtgtcacttctcctttctagatgttttaattttagttttcatattacttgattcagatctgtgttaatcccatgtaagattcacctagcctgttgaatttgtaggtttttcaagaggttattatttggggggatctataggtttttgtctgatttgggggaataaatttatatggtttggacagatgagtgtccttacttgcctgaacacaatgtgtattctatgcttgtttctccttcaaggactccgagaataggaagttgcatccatttttaaatttctacatttccataatgtcttgctcatgttttccagcttatgttttgtcttgcttagtctgggtgaatcctattggaacattctcatgttaattcctaatttcatctttccatttttttcagttaggcatccttcctcctataaatttttgttgttattttattattaagacatttttccctttgtctttatggtcatgtcttctaacttaatggaagttctccattattatctattttcatgactattttaattttgatggaattttttagaatggaagctctaatatacttaccacatattcccaacagaaaagacatctcctgcttttcttctgtgtgtacactgagattgttgtgtaatctttttaagtgatgaatgattgagcagtacccagatctatgtgagtatgatattaaaaataaaaaaacccttgggccttatttaagtacacgttcactgatacttcttaggtaatcagggtattgttttgcctaagtcaaagttcagactcctcctcagacctttttgtatgctcttgtttagggagtgttgccttttttccctgacagacactacccctatagaagagagagaggccttctggattgctgactttagacaaactctaatgatacaaagaaggttgtcttctagatacagagtgctcagagggatttctggatgccccttagtatcttttggcatagtaagagggctcttttttctcattgacccacctctatcttttcagggagaagactgcaaagggtgcctgttatttgatagaaaaatacaaatataaattctacatctattgatgcagttatgataaggtaaacggttttcagtttttatctaaaacatttgttctgtcttagagtgtttcttctgtgcttgttacacacagatgttgactggactttttgctattgttcctgttagctatcacaggtgactcattgtgtcccataaagtcttcaatatgcaagacaaaaagagccctgatgcagtggtccatgtcacacatctttgtctatgtctacagtgtctttgtagaacatagatactgctctagtggtatgtcctaaaggggattaaagtataattaatttatacagagaacgaagcttatttttttgaaactagataatctgagagtggtttgttcaatcagatagaaagccttaaaagcaaaactaaggcttccacaaacaatgaattttgcctgtggctttgaggttcatctctagccagtctatgttagacttccttttctgatgggatggcctatagactttgaaattgccacatagtctttcaaaccacatgagccaatctcttgagattaatagtaataggaaattgtgtgatgctgtgatagagtctcccaaacatggaattgattcaggtagattatggaagaatttttcagaggcatgacaaaaaatctcatcccattgaccaggagttttgtcagttaatcagtaagactcacaagggagataactatgataaaggaggctcatattaatgtttgtatcaacacaaacaatcctggttgaaagtgacatttgaaagatcttctgataaagactcagaaggatattatcaaagttagatcagaagctagagagaataataatccttaacatatactctcaaaaatttggcttagttgagcatagtggctcatgcccatagtcctaatactcaagaagcaaacggaagatgatggccatgaattcaaagacagttcagtctatataacaatttccaggcagaaccagggctgcatagtaattatcttttgcagagagaggctgggcaggaaggaaggagggagaaaaatgaaggaagaaagaagagagcaagacaacaattatatgaagcctggtaagatggctcccctggtaaacattctggagcacaaacctgatgctgacttagatccctgtcccccacaatggaagaagagaactgactcatgaattgttctctgacctccacagagtgatctggtaagcattcatgtatgcatgtcttcacacacacacacacacacacacacacacacacacacacacacaggctcacacaatacatgtccatatagtaataatactaaatgaatacattttatgaaaacaactgaatttatctgggtctgtgtggatgaaacactttctgttggtgagctttcacattttgctgcaaatactcccagaataatataaagttgaaggtcaacatcctcaacccacttcctcggaatgtgacctcttcaccattagttttcttatgaatataataaattgagccatcaggatggaccctgacctagagtgacgagaatcttataaaggggagatgttgtgaagaggaatacatgcatacatgctgccatatgaatccccgcataggtatgcactcacccaggaagtctgtgtgggctcttctctcacaatgctcagaagcaaccatggatgccaccaccttgttttgcagttctggcttccataagtatgcaacgatgcatgtttggtccttacatcttccaaattttaatgctttgtggtggtttcatgtcctggtctgtttgaactgctgtaataaatgactgtctactaagtggctttagtgaaaaatatttgttctcacccttctgacaaataaatttctgaaactaggatgtggctctggctttcttctgtcaagcccatcctctaataaagagatgggaatgaaaattccattcatattaaattcatcaacctgaatcaagactcctaagagtttgatgcaaagcagttcatggacagcatcttaaaacacaatgcaatttggaaaaaaatagtttactgacataatacaatccttggtctacaaggaaccataattatattgaaacttgactcaggcagggtacatgtcatttcttccaagaagatggattttagagataggttacctgtactagcttcagggtctagggaaggctctggcctgttttcagtcatacagatagtgtatgactatatggtctattctagttctggttgtgggagcttgggggagcccctagctgtacaaataatataagggtcatttagactattagatgtctcctgccctggttgtaggagcttgggggaaccactagctatacaaataatggaaggctcatttagagtattagatatctcctatcctggttgtgacagcttggggagcccatagttatatactatgggctcatttaaatgggtcatttaaattcctatgacaaccagtcctggttataggagcttgatatgacctggcccaacagataatgcagatcaccaggatataaataacttccagttcccagctatctgggaaaacaggttatatatccctccttttaaaacaacagtcctgcacaaaagacctttgttacttcaaaactcaaagacacagaaagctggcttctggcatccacagaaggatgaggttttggggttcttgtgagagcacatttgccagtaataagggcttcatttcaaagcctaattatatcccatggagtccctccacaatatatgatcacaatgggaactggattgaataggtatatcttgtgcttatgggtgaggtgtatacacatatgtatgtattggtacatgcacccatttatacacatctagactaatgaagtatttctctaggcatctttctttatcaatccccaccatattttttgagatattttctcactgaacttaaagctgtctgtttccctaagctagctggatttgcctttcattgtatcccaacctctccatcaatgctgaagttacaaaaatacacagatatgctggggttggccttggctttacctgggtcctaaggatttgaactcaggtttatttgctttcacatcaagttctcttacccatgaacacaatttccaggcccctcaacacatgaaatttgagaagatagtaaaattcaggctataatattgccccaggaagtggttatatgaatggaaacaatactccaagtggactggtagagaggaggatatagttgctaagtatctcaaccctctaacacactttgaagccacaactacgtgcatcatgtcttttcttctcccaaacctgtcatgtctgagccagaatagcatttaggagacaactgaggactcaatgtttaaattaaggcaagtataagtaggctgtggagtcccacctgctggtcttgcatcttattttgacggtgtctgcaggattcctttggcatgcctgactgcattatgcatctgtcttcacattttaaagatgctcacattgtccaactcctaacaatctatggagtatataaatgccaaacatacatttcttcaatcttaaaggcccctgtattacttcagattttaaggtcccagtttttaaacgtacctgtcctggaaagaatcgaatctatcttctgtggcttctacaaccttgaaagttaaaaactacactttgtagcctggtggtattggcaaacgccattaatcccagcacttgggaggcagaggcaggtgaatctctgtgagttcgagaccagactggtctacaagagctagttccaggacagcctccaaagccacagacaaaccctgtctcaaatgccccctccaaaaaaagagaaaaagaaaaaaagaacctacactttctaagtgtgtaggtttttttgtgaaacaactcttaagtgtagatgctaacatttttcttgatgtgtaatcaagagtagattactgaatcttagatatgtttttggattcaacacaaataatggctataaactactgaattgcataggtggcaatattgtttaggcaatagtttataggtaatattatgagcctctcgcaagcctttgctccaaagtcaattatttcttagatgcggtatcaccagacagagctgaacagtcagctccttgtgctgcctccatttttgatatcttccttccaatacggatcatttaattcaagccttccctcctgagtgtctgacttatgtgttcaatgctacatgagccctgttttatgcatatctctgttactaacagagatatacctctgattttctggtttaatttcattctttaaggagtcggaacttgtaacattctgttctttttaactttcttctggatagacctgtagtggcatcttgccttgccagtgaacttgtagtgatggccacaccctttgagcctgatttttggtggagatgtgacctattgttaggtagaggaggggctggcttgctctgtcttgggtttcacagagcagcagaagagttcactattgaggcaagatgtcactacatatacccttctttgttaattgttatacttaaaataactacaaatacaaggttgaaattcaattttgaactaatgtacatgtttagctatgcattgaattatgtaagcccctccatatgctgatgtcctaaagtgaataggtttgattataattacaacttcatgattgtagttagggaacaacaacaccatgcatatgaatcctacactactgtgcctgtgtcctcatcacaggaggttatgaagaaaaaacagtaatagagaaaagaccatgtaaatattcagggtaaatggaatccctacaatccaaggagaaattccacagaagaaactactgctatcaatgccttgaacttctaaccttcaaaactgaacttgatgatttgtattgattaccaacttgacaggctacagaacagccttagagggaagcctctgggcatgactgtgggaagctttctagactgttttaattgagattggaagatcctccctgactggaggactgcatgagaataataccagccctttcccccgactctgcttctgtaacctagaagcaggtgctgtatcctgaaccacagacaggtcatgagagaatatactcttgaagcatgattcaaactaaagtttgaattaaacctataatggctccctctattatggtatctggcactaggggaatgtccagagatgtacaaagatgaccccacctaataatctaagcaatagtcaagagactaccttaaatgttctactccgataatgagattgattacattgatggcataccttgtatgccatcctaaagccttcatccagcagctgatggaagtagatgaaggcatccacagctaagcattgagctgaactttggaatccagttgcagagagggaggagtgatgagcaaaggggtcaagaccaggctggaaaaacccacagaaacagctgacctgaacaagggggagctcatggaccccagactgatagctaggaaaccagcatgggacttttccaaatccccagagggaagatgtcaatttggagttctggttaatctgtgggacctctggtagtggatcattacttatccctaggatacaaatggactttgggaggccacttaacatagagggatactctctcagcctagacacactgtggagtgtctaggccctgttccatatgatatgacagactctgaagatccccgtggaaggcctcacccctggggaacagaaaggggattggatgagggattggtgggggacaggggaggaggggagggagaaagaactgggattgacatgtgaagcaagcttgtttctaatttaaatttaaaaagaaaagaaaaaaagaagtaaaaaaaaaaaccactttgttttcattctctttagttagatattgtatcccagaaataatacaagtaattaacacactgcaaaaattaatttgtttaacactcactccaggatatatgttagggaagccccagaaaactgatatggacttctaaataatttccaagcagtaaatattataagttttgctgtttaattttgaagaaagggccatttggtgtcatggttgaaattttgtgcctcattcactaggctatatgtataggaattcataaaaatgatattgatttcaacattcttggtcttttctgaatctaattttacgtggaagcttatgattaatggcttatccctttaaatattgggtctattcttattgttaatggaagctaagctccaggtagtcaatctaaaaccttaggcagttggtacggctgtaaagtaaattatagaatgggaagtacttcatcttcaattcctatatgtgcagctgttgtgggcatacgattttataaaacgtatacgatttcacttttagcttacccaccataccgttagcttcttgaagacaatggccatatttatttttttgtatctctagtgtctagtatgactcatatatgatattggtatttagtaaatctatgtttgaaaggagaaaattattttttaaatgatgtcatatagatccccatacttttacacataattttttatcattttaaaagctgtcttcttcacatggataacataacagtaatccaagtgtttgtgttaagatcccaggattgtaacgagatatattttttaaattttaaagcatttgctcaactaactcaaaggaaatgacttatggaataaaaattcatatccactcattagaaaatagtccaaagttttcaattcatggtaagagagctgaaaaatgacctatttctgaacataaacagagaatttattgttacactcctattactcacctaaaaaatgggcccaataacatgctaggcatcctgttctccagcaaaatatcctgggatgccaattaactataagtgctcaggacctccacattatgcctcatccaataagatctcctgtctcttaatacattaaaacaaagagtgagtcacaaggagatcaatactgttaaactccagcaagactacttggaccaaagcacattccatttcctcattagccatgaagccagagacagaagggggaggttccagctgagattacaggcaaatggagcctccaaagagcacagaatcaaatgtattttatcaaaactaactttaaaaatgcatgctgtttcctcctacttattccataatttattaattgcaggctactttcttttcccaatgacatttccattttgtttttcctttccaattttgtcagcttcaggaatagtattttaaatgaatttttgaaagatttgaggaaatttcatttttgtttttataaaaaggacaatgagtaagttctctaaattttaaaattgggacgtggattttattctcgtttttatgctttacagcagaatccatgtatcacaaaaggtatttctatttttccctatgccttagagacttattcacactttaactgtatgctgtataatgcacatataaactgagactcattatttttaaagttttaatagtgatagcataaactataaataaaactagggatattagttttttattgcgtcttattaaattagcatattcaaaacaacatttcaagaaagagtaaatatataaattaacaaggggctgttttacatccttagtactcagtaggacagattcacagccactcaataggatatttcacagcattaagtaggacaagctgctggtgttgtatcagttcttctgtcttgagcttctctagtcttcagtgattgtgaaagcacatgccaatgcttgcaaaatgaaaacacaagctggcacagacaaaagctcacttgtattgaaatgacctcacgaacagagaagcagtgcttctttatgtaataaaaatgttcagtatcctgaaaacaagacttgttaaaagaaattaagttgaggaaggcaaacacacacacacacacacacacacacacacacacacacacactgtgtgtgtgtgtgtgtgtgtgatctttgtgtagtatacatattctttacacaggtggctgtgtatgcaggagtgctcatatgagcatttatatgtcaaggccaattatccaagtcaaatgccttccacaacttctggctttactttttcagacaaggtctcttactgaacttggagcacttggttcctcccatctctacagtcactccccatagcagcagtgacaaggtaccatatccagctattgttacctgaatctggaaaatctgaattcagacgatcatggttgtacagtagccacttgaatttctgagcctgctcccgaccctgccaagcataagatttagtaggtaaaaccataaacttgtcttcttcagaactctcagcctaacaagaaacaggtctatcaaaatatgatcatggacagaaataaagttctccactgatgttcacttacaggaagacctgagtgaagtacagtctaacattctgctatcccagacatgtggctgaagaaccatcaggttaaatatacttactgttcttgctgaggaccaagttcagttctgagcacctgtgaggcagcccacaacatccataactgcttctgatatggtggatctatttgaacattcctggaacaccaatttccatgatggtgatccttggatttcttcccacagtttacacttatttgtctcatgtccttaacagcactttatgaacttataatttgttgttgttgttgttatttttattttcaataacaattcccagtgatgagtgaagacatactgtgctttcatttacatttgtatgatcattaatgacagtgaacatttttattttgattattttttttttagaaatttgatcatctggtgttggagagttggcttagagattaagaatactgagattctgcgttcaattcccagcaccctaggtcaacttacaactctctgtaaattcaattccagagaatctgacaccctcacacagaaatacatgcagacaaaatgtcaatgtgtataaaataaaaatacatctttaagaaatttcactatctgttatactattgagttgattttgtcatatattctggctgttaaattttaccatatagctactatttgaaaatagtccttataaaatggttgtgttttcaattcaattattttgtttcttttgctaagcattaacttgtatataatcccatttgttattacttttgtgtcttgtgatttgatgtcttttacagaatgtccctattttagagttcatcagtgggttccctatattatctttgagctgtttgttttctgtcttgcatttaagttgtcagttaattttgagttgattttgagttggtctttataactcatcagagaaagtattgtacttttattttttcatatgtgaaaacctggtttcacaagaacaatatattgaaaatgttgctttccaattcctgatctttgctcctttattggaagaacagagagttgtggatgtgtgtggttacctctaagttgtctattgggttccattagtctgtgtgccaaaatatatgtaaataccatgctccttttattactgtaattttagggtacattttaatgttagatcataagttattctcacttcactgtttttgcccaagtttgacatgaatatttgtgatgtattttgctgttgttattgttgttcctatagattccagatgtttttccctaggactatgaaaaatatcattggtgttttggtagggatagagtctttaagtcatgatgagtggtgtaaacagttatacagcattgattcctttagtttctgaccagatgtctttctcttagccttgtcaaaatttttctgcagtgttctatagttttaactttgtggagccannnnnnnnnntacaatttagaggggctagtgcacttttctatatataggaagaggttatgataatcccaaaactgtaaggagaaatagctcccgtcacggccaaataaattaaaatcagctttttaatttgtgtgcaggggctgtctctcccaaaggtggggtttaagtgatcaccattaggtatggagaagataagggtttttatagtttagtagtaggcagtttcaaaatgggggatttggtagataaataggtggggttacagaagcagaacataaatataacaagttggtcaaaacaaccttctgaaacaaagacatgattggaagatggtcataacaagtggctataacaaattagtcacagctaagttttcacaataaggctatcataataatcttctgaaatagaagacattgtggctgtttgctggaacagtcagtacagatccatttgtaggtaaggatagatgttgggcacagtccaagttttgattatcaggttcattcacaaacaggactgaatctagtttgttcttttttttttttttttttttttttttttttttggagattataatattccagggtgcactgtatcttgatatcagtttacaacctgcctcctggctgatgctgacagttgatgattgtactccctcttcttctgtttctcccttctgttaccatcattctttcactgttactggatggcttacattaccatgtccagtcttttggttggcttttttcttatcttagaatggttttaaatgtttcctgatttcttccttttttgttgttgttgttgttttgccttttgtttttcaagacagggtttctctctgtagctttggagcctatcctggcactcactctgaagacaaggctgagctcgaactcatagagaacagcctgtctctgccaccccagcactgagattaaaggcgtgtgccacgaaaacctgcctcctccttgatattttgatttgtacatttgcataattaccaaatcctcttccttgtgtttgaaatctcttattgcatgcttgtttctaaagaaatttgatgtaatcatactctctacatggctggtcacagtataattcccagaaagtgctctacatgcatactgcaagactgtcccattaagttggatcaacaatttgtaggggtatagtccttaactggctgcaggtatgttaaaattcatgtgtttgctggctttctgtatgaataattcaccatcaatgcaaggcaagtaccaatggccctgacagagactatactagagtcgtctccttttgtacttgctgcagatgtttccattttctaatagtagaatatccatatttacaataaacttttacatacaaaaactatgaataaaatctttggagagtacactgtagcatcataccaccatgctaataatgttcacaggtaagaaaaagaataattttaacttacaataatagttttaaaaaatgcaatggtgacaggctaaaatgaaatgggggaataaataattttaatatcttttgttataatcatctaaacatagttttaaaaataaatttgttttgttatgtgacactatccttggaagatttgagcaaatatctgctcactccaaacagggaactaatgtaagattaaaatatagctataaaacagtccaacttgatgaactgactaattttattgacattatttacagaaatatgggtgaggggtgttgatatcctagcaatattctgactccactccctgtaaactggcaagatatgcacatggcattaaacagatacttggcccagttcaagggccctgcaaccacttgtggctacatcttgtgttgtgtgtcacaagttgcttggctgtataaggactcttttatgcatttgcaagcttttggttttaagcaagcaccaccaacctgccccttcctttcacttcttctcctagttgaccaacaccaacttccattacccctttgctccccttcctaataaactccatgtgggttttgttgaattcggtggttctttcctcaccactgtggctgcagcaaaatattttgtgacatgtgactctccaggctctctccatggttcctcctgctgcatgtgggtgggtggtctgagacacatggagaccctgacctgaactgagagcccaatttccatctactggtccactgggatcctacacaatgctggttacaattcttaatgcccccttttcccagttggagtaaatgtttccttgaacttgttggtatgactgttgagcatctgccacccttctggaggtactggaaatggaggcacacccagtcatgttcttcaaggctatggctggtccctatcactgacaatcatctctagtaaatttcccatgaggaaggccttcaagcatttgattggcctccctagcactgccctcactgggcaacaccttcttcttttgacatcacacccttggcttagtgccttcccttggactctgtgtcctcatgggcttcttagcccccagccccagttttgtttggttgaaatgttgtaaaactgacctgagccaggatagggatcctctgtttaaaagccattggatctctctgcctcccttaagggaaacaaattgacaaatagtattagcccacccactcctctgggttgcctattagagaacctaaaaccccttcacttaatgccatttgtgaagttctccagtctcactcacctctgtactaagaaatagcccaaaaaacatgaccctagataccaacttaaattggccacctaactctctgctaaacattctccttcctcttcctcatctccatttcatgtccttctatctatgaaagctgaaccactaacttagatcctgctaacaaacctccccctaacatccaactgcttctttctaccccttctgcccagcccctcttcttcttcctctctagcaacagcctgccccaaccactcaacaacctcacctactttaacccaccctagtaactcattctcaagcagctatgtgcccacactctaccaagtccaatccagttacagttttccctgtgtgagagattgtcagagtgggtggactggttaagattcatgtccccttctcactatcagaactttctcagagagaaaagaaactgggtgcttatacctctagttttgctgccttcataaaagaattccaatataagtttgggattagcacagaacccatacaaactaagttgaagttcataagactaatgcagctcatctggtcagggtagaggctgtctcaaataagaaccattgctgggattataatattccagggtgcactgtatcttgatatcagtttacaacctgcctcctggctggtctccttaaagctgccctcaagccagtaaactacaaaaaagacttctgaaaatagatcaagacagaaaggaaaatccatctctattcctagaatgcctcacaaaacccttcttacagtatacttacctagactccaaaaatccagagggcagacaactcattatgacctattttttcccagatctttcctcacattaaggctaagcttaggattctggaaagaggacctgtaacaccgcaggcagaattcttaagtctggcctttaaggtatagcatgagagatatgagaaagcacataaacataaatactaaattgtggccaagtgcatctgacaggccttagagtctgtcagggctccttcaccccctggggctggaggactaccagacccatgttttattttttaaccaggtccatgttttaaatgtggttaaaatcagcagtgggcctgtgtatccctgtgggccacacagacaacatccaaagtgtcagcaagagggacactggtcagatgattacccctgtgcatgtcctggcatggggacatcagacatagatggctctccagcttattttctaggcctagccatggacagtgactgaaggggtccaggctctcttgacctgaccactgtcatctctgacaggaaactctcattgaacatcagggtgatccccatattcttcctcttggacatagatgtcacctattccatccttgagtgagttttgggaacccacctctccttcttgtctccccattgttggggcagggggacagctttacctacttcatcagaccccaccagtcaattgcattttcaggggaattcccctcactccttcatttttggttgtgccaaactgccctgtgcccttacttggaagggatcttttagtcaaagtaggagcttctatttcttttgctctccccatatgcctgaccccagactcaccaatggcttctcccctcctccttctggtcacctaccctattggttccaatatgccatttcctttatcagcctctcaggtagacctgcaagtctgggacaccccaaacccttctgtagctagacaccattcccccattgccattcagttacagggcccctcctcgtatatcacccaagcccagtacctactttcactcctctagagctttaggggacttaaaccaatcacccctgacttcctaaggaaaaaaaagactatttcatcctacatcctctgccttcagtatccctatacttgcagctaagaaacctaaaggaacctaccacctagtcaaagacctctggatcattaattctgcagaagtgcccccctctcctgtggtgtctaaatcctacacccttctctccactatcccctcagggacctctcatttctcagttctggatctcaaggatacctttttcactatccctctcaggtctaagtccccaaatatttttgctttaaactggactgaccctgatactcacctctccacacagctcatttggaccatcctacctcagggattctgggacagcccacatctttttggccagactctagcttagacctactctctctgtctctccctaaatctaaactcatacaatatgtagatgatattttactttgcatcccatccttagaaattagccaaactatcacctctgctcttctaaatttcccatccagcaggggctgtagagtcccagcttccaaggtctaactgcactcctcaggtcacctacttgggactaaccattaccccaactcataaagctattactttagactgccaaaaaaataatccagtctcttgcagtcacttctgataaagaggaaattttatcattcctaggcttcttgtgttcttggatcccctctttttcccttctggtacaaccttatttgaggagtctgtgggccccccatatgaacctctccttaatcctttgactaagccatttcagaagctccaacaagctatcctccagactccagccattcatctcacagacctaactcctctttccttcctttatggaacagaaaaggagggatatgcacttggggttataggccaccagctagcccttcctttgcacctgaagcatacctgtcaacaaaactagacctaactacccagggatgaactagccagggatgggcacgctgcatacttgctttagcagctgctgagctccttattcatgaatcaaagaaacaacctttgggtcacccatcactgtcttctcccaccataacctatcccatctcttaatttacaaagacttaagaactctacctccttcccaagttctttctctccaagtggcactagcagatgccacacttactctctaattgtgcctaccccttattttctcaaatcttcctcaacctaatactgaatatttcccatcttattcttgcattgaaaccctagaggaggtagtgccccattattcacaggtacaggggagcatactacctcggggtatttatacctagtacacagacagtagctttttcttacataagatctgaagagcaggctattccatagtgtcagatactgtggttgtggaggaacaggaacccttcccacactaataaccaataggcaaattaatagcactcacccatgcctctcagttggcatagggacaatccctaaatgtttacacaaacttcaaatatgctttcagatcctcctgtgccatgctgctttttgaaaacagcatgggctacttactacaaaaggaggatctataactatttcaggtcaaattatggccacgctaaaggcctcccatctccccaaagctataaggattattcactgactgtctcatcagactgacagctccattatctctagggtaaacaatcaggctgacaaagcagctagggcagcagccctcctagacccagactcacctcacccattcaccgcagggagttcatacactacagcccacatcttcacagtcacctcctgacacttgacaaattctgtcctatttataccagtgctttcatcctaatagtcaagctctatcttattttgtcaaagctcacctccagcccactcatgaggacctgtgtttcttaagaactatcactgccacttgtaaaacctgtcagatgtcagaccctaactccaggtattgtggtctcccttttcctacccacaagaccagggactttcacccacagactcactggcaacttgactttacccacatatccacagccagacaagtcaaagatatcctggcattagtatataccttttcaaagtagactgaagcatttcccacctccaacatgagggcctggactttctttgatgtctgtctctgggagattatcccccaatttggaattccaccctcacatcactcagacaataatcctgaattcacctctcatatctctcaaagcctatctaaacctcccaacatcccttggcattttcatatctcatacctcccccagccctcagggaaggtggaatgaactaaccattccttaaaaatattcttgttaaaaattcacaggaacttcactttgactggataaagctcttgcctctatctcttttcatgctctgggttccccctgttagacccccagaaaaactcaggtgtctggggtcccaggccacaactttggtctccccaatcaccaggtagattcaggagcttgatgcaaactgcattaggctttattgtttttttaacaataaccccatgttagctccggtctttccctcacccgccatggcggatggctcacaaagacaccttgaaccggctgcccatcggtattgtagggcagtgtaaggggagtatctaggggtacgaacagactcaggattggtgtgcctccaggcttggagggcttgccctgtgttgattggacaattggttgttatggcccatagcccctcccagggtggttgctatgctctgcgcatcattgctgtgtgcttgtccataaagtacacccagagtcgtaaagcatagcaccaccagctaacttctgattggttccttgtcatgaggcaggcacctaacctctagtgactaagacaaggtcatagctagcaagtgttactgtcatggctgcttaaatgggtggctggtcccttcaccaccaaatgacccctttccattttgccctttgaactcatatatgggtggtctctcacctaaaccctcacatctctctcatcccctgcttacacccttacttcatcatctctgttccctcctatgcaactttactgaccactccttagctctaccatgtaccaacccctgtccatatccactcaacattgtggtcaggtccttctgtctcttctagaccaacactctcaccatttcccctaaatagcagggtccctacaaagtaattcatgtaaccccaacagcagctaagcttgagggccttcttcagtggattcacttacctcatctcaaaccctttaattctccacctgaagctcacacctcatacacagcaaatgcaatgggacccttattccttaggctttggaggagacagacatcatctgccttgtccccaatgcacgaggcttcaccctacaactgttctctgccagatttgaaccacatatgctttccatcctgacccctcttcctctcccaaggctgacccagtcctatttgtaataattataccctgctggatcaatctcatctctatgtatccccagtgactcattgaaaagttctaatctaaccaattagctattgttactggactacaggccactttgttagacacaaagaccatctatcgtgtccaagtaacctaaaaatcaaccacctgtgcctcctgagtgaatgaatgataatggaaaaaaaaaaaaaaaaaacaggtactttaaggtttgcttatgtaaaaagaaaagctaaaagttgacctggattcacttcaaacaggtcagataccccttcccacacatgcccaagacctaagaaaattgttttcctaaatttaactttatcctatgctctgacagcatcttgtcggattcaagaaacatcagatggccccacatagccttaatagcagtgaaatgaccagctacctgcaccccagctttctcaggtcctcctcatataaagatggtcaacaccccttatgtctgctggaagcagtgttgaggatttggtgcccctattcctaccctactggacacttccttttaatccttcaccttttaataaaaaagaggtgggggtattaagatcctggcattatgctgaccctaacccctgtcaacaggcaggaaatgtacacagcattcaggcagatacttggcctgctcaagggtcctgtgaccattctagctcttcatgcatttctcctgcattgtgtggctgtaaagggactctgtacacatatgaaaggtttctctttcaagcaagcaccatctgcctgcaccttccattcacttcctctcctggtctgatgacatcaacttccctcttcccttactcccttgcccccttccttagaaaccacacgtgggatttgttgagttctgtggttcattcctcattgctgttgctgcagcaaaacaaggggttatttagaagagcagaaatgatgtaaagacagctgtgtcaccaaaggccacccctgaatgggtgacggctcaccaaagctggaaatctgaagcaaaccagactcccttcatatgtgccttttagaggcagctcagcttgtgtgagaaggcctctaagtccttcttgctcacacacagatggggtagaggggtttagtgaacatggtgagtttcaaagacttcctgatggatgttgttttcagttagttacttcctgaggttaatgagcctttctgcaggacaatgcatttcccctccccttagaagtccctgtagacatcctgtgcttaaggggcttcctgctttgatgggatattttgatctctaagtaaactgtgctgtacaagaattttataaaccacgattgtaatgtcagtattttcataagttcacatttttatacaataggggtgatttacagataaacacagagaaacagtctcagaactttaaaacatctacaaaaccatttcatttgtaagtaatttaatatagaggaaagttgagatttgtacatgtgagttcaggcacaaggtacagtccatcctgaggccagttgttcctccttaaattcctccactgctgtggttctctggagctccttctcctgatatgcacgctatcatttctcctgagccttctcccacactttctctattcttcctcatcctgataaagcacagcacactgtctacacttgctttccagcagattatctcaaagcaaatactgtctctgtcccttcctagttgcaggactatggagaagctgcctgagccacatgctgccttactctgcatcttcacagaagggtcattagcatctgactcaagaaaaagaaggaaaacattcaagtgtattatggtctggcacagagaatttatcagccgtgattgctgttttcaccttcatgaaacagtttcttgattagaaattagtacctctttacatgtgcaagtgctgatgtacatcatattcatatatgtacatatgtccacacacctgtctgcccgtccacacacattggactgttgcatataaatggtctatttacattttcattttctatttcattccaataaacctgacagagtcagtttaagagaacctgataggctggcttcccacagagaacatgtattcaagataatgttcacagcttgctataaatactagcctacgatcacaacctgacacaaccataaaatgtactttaaaaagaaatataggaaatggaaggaataatggtggctgtaagtttattctaataccttctgcaaagagggaagcgcgtgcatgaaataccattgaactgaatgctgatacacaatctgtcaaaacgtatttccaattctcatctgaggttcaaataacattctattcttggaaataccttttgttcaaggtgtctcctcttcccacacagttcagtgaaatcacttttcttttgttaaaataaactgtgctgtctagagatcatatgcccgctatcatttattttaattagccggtgcaattcaaattaaaattaaagtatgtgccaaacaaactcctcttctctcctattgctttcagggtgatttacctttgccatgttttcaacactgttttcctgtccatgcctcttcccatgatactaggagagtatatgtacataagaccatgactttgaacttctatttttcttaatgattatgctattctgtagtttaaacttcatgtttgaagaatataaacagatgacatgaggaataaggaagttgatttggaatattgtcttgtcctgaaaaaaaaatatccttttatatagctctgacaaagactgaaaacttttctatctggaagagaatctcactatcagttggtctgcatatacattcattcattgaggtctctaatcaagggaggggatacttggggtttctcagtcatgtgtaagcagcacattgcacagaagtcattggcatcagaactgttgagaaagagagacccagtatcctgtaactacaaaacatgtattccatctgtctcctgatcatcccccagattctattacttcccttgtgcatcagtagtaacattcctagatgctcacttatgttgctcagccctgaaaattctgagaagtactgcaccaagactctgtattcagacacacagggaagaaatcaaatgtgttgggagcttatgcacaaaaggcaattctcattctgagaattgttactaagacctttctctttgcaaatatgtgccagatgacatgctcaactttgtgcccaaatttggataacacgtgagaactatttatgtaaaaccttgtgatggaaacttggtttatattttagtggtgcttttgaaaattaattccaaatataaagttctaagtctggtagcactggtgcttcgatgcttaatgatttgttctggactcaacaaaagttattttccacagtagcttcaggaaaagataactaaaaaataaatttatttggtctctttttgtctgatttcttattagcctacgtggaaaagccaatggcatatactgctcaaaggtatgtcaaatacatgacctaattgtacttcaaaactccttattaatgtctaatatctatttcaaattgaatggaaagtctcatataaatctttattaaaatgtgagataataaagaagatgtctttatgaagcctatatcccacgatcagaagatctattatttcaatgtgccctgtatgtgattgtttcaatgagatggtatttctcagtcccgtcagtccgaagtctttcatctgaagcacaattgatatgagcatagtcaattatttacttaccatatgaacatgtgttttacatgacttcagtactgtgacacctgccagaactttaagttacatgtggaccatcagagcctcctttgagcaaatgaaagagagagagagagagagagagagagagagagagagagagaaaatgaaatataggaagagagagcagagagagagagagggagacagagacagagacagagagagagacagagagagaccaagatggggagagacagagagagagagagagagagagagagagagagagagagagaggtgtttatgcatgcgaagggtaagtgctcacatacttgagcctgaatgagctagtcagactaaggaggacattgtgtgctccctctaacacatggttcttcaaccttcctaaagcctcaaccctttaacatagtttctcatgttgtggtgaacctcaaccataaaattatttcactgttacttcataactgcaatcttgctactattgtgaataataatgtaaatatctgcttttgtgatggtctcaggttgacctctgtaaaatggtcattccatccacccccaaaggcaacaagacccacctgctcagaaccactgctccagccatgtttttctccacttattgtcatgagacctaatttctcatagcatctgatggttagccagcaggctcccagcatctgcctgtcttcattccctagtgttgaagctacagagacacagacatgcctggatctctctctctctctctctctctctctctctctctctctctctctctctctctctctttctctatccctccctcccttctttctctctctctgctctcttcctatatttcattctctctctctctctctttctctctctctctctctttctttaatttgtttgtttcaatttgtttttcaagacaaggattctcccaattagctcaggagattatagccatgcacataacttaagtccaaatggatctaagacctcaacataaatccagccacactgagcctcttagaaaagaaagtaggtggtaccctcaaatgaattggtaggggagacaacttcctcaacataacaccagtagcacagacactgagatgaacaattaacaaatgggacctcctgaaactgaaaagcttttatagggcaaaagacacaaaagatatttaccaaccccacatctgacagagggctgatttacaaaatatacaaagaactcaagaagctagtcaccaaaacaccaactaacccaatgaaaaagggggtacagatctaaatagagaattctcaatagaggaatttaaatgactgaaagacacttatgaaagtgctcaacatacttagctatcagagaaatgcaaatctaaatcacttttttttttaaaaaaaatttacatttgctgaattgcagtcaggcagactggtaactttccatgtctgaggagatatgacagctccaataaaaacacacttaccacagaaagtctttgctttaactttcttttcttttcctttcttctaccatactggccctttcctgccacattgaaaaaatttttccagaaaagcttaggaaaatctaaacacagcaactcaatcccttgaaaaaattctagcaaaaacaacaacaaaacctgctctcagcaacatgatggacatccttttcaaaggaaccatatgtaaaatattcatgtgttgcttccaaagttagtcatacaggagggatgatgagagtgtaggctctagtataaaagctgacactgttcaagtcatcttgatgagacattgggtgacactaaatgttacattagtggtaagaaagaaaaatcaacatcctactggtcagtttctgagtgaaaatcaatgaaagtagagacatgagatcaatgaggcccatctgatcttaaataggctgaccttgaattaggagatagagtctgtacaattcaatgagagaatgtactagaaagtacaatggtccaaaagcatgcaaaacctattaatagaagatcactaatattaaacaaaattgtgtgacaagaagaaagtctggtcaaatatttaattccccatcatttctctgtcttcatccattgaagagattttaatggtctttgatagtcagatgatggatggaaggtactcagcaaaggtatgctgtatattatatatgtaatattatatacagtatacatacatatatatgagctctaaaacattgtaagaaatagcatatttctaaagactatctcactgttggatgcttctgagcatgtggaagctgtatggggataaattggtccacaattgaacaagacaagaaactaaggtgcattcttctgggaaaagaatatcgactttctgatattattagattaaggtgtctgtttcttatttccagttatatggttctctttatcaagcaaataatgttcgatgtagtaattctttgaaagttaattttaaaatcactgtctagcctctttccatagttaatgtaatatatgcatcttttctaagtcaaattagcaatcatagtattagataaagcctgaatataagaacctaattatttcaaactaattatctaatagtggtcactttcaaagtaacaggtaggcttatgcaatagaaaggatatggctgaatacttcactttaagatatcatcttgtggagcattggaggatcccctgtgaaggcttgattcagaatataaaactatacaattgtacaaaaataaaggactttacaagaatgctttatttataatttatagtaaaacttctaattatttcattctgctgtcctgtattaaatatttctacgttcaggggtttagattcatatatccagaccacacataccccattgtgtcaatgaatatcttgcaaaacttcctcttcattcaggaaaatatattaaaagtcaaacaaataaattgtctaattttatcaaaagaaccttcaaacattactcaacattaatcaagtggtattttctttttctgtgttcattttcctaagaattttaatgaaattggtctttgacaattttgtatttatgtaaagtacgttctgttactataacctcttcccctctctgaaatccctttaacacctattattccccccctaaaagcatgttatccacaatcatgattttttgtttctacactagcaataactacctgggacatgtttgacagttgttctcttagtatagatataatcctaagatattgttgtatataatgatttcctagggaatttggatttaaagagtcttgttcaaggacttaaagaggcaaacctactcaacagtttctcagtagatgaagatgccttcataatcaggaaatatgtttctatttcaaattctttgaagagttacataactaggcgagaggtcagttactaagtggagttgtaggtagttaataattgagaagttaaattaagcactggaagggttggtcacagtaaataccagggccaaaggaatccaagagttttccctgaggtattaccaactgcattgtggggagaatagtggaggatgaaatcatgtgtccagacaagtcaacaaaagagtgtgaactcattcagaccccaaggctgtgtattcttgtattttttttcttggaaacagaaaattaatggaaatttgttatcctaacccttttactctgcctcaactaatagaaatacctaaatttaattcactgggacaatatatcaatttttaaaagaaaaaattctgaactacttttcatggatactttcctgatctctaactgttatgatgttggtgctcagtgctcatagcattggagtttttgtccttaaggatttgaatgttgctacagaattgacttgtttaacctagtactataaatcttgtttcatggaaaactaactcctccctttacatgcttttctcttttggcccttactattttctgtaattagcaacaactaatacagaacagcatcatactttgccccatcctcgggctttcatatactgtatgctgaacttttcagctccatgagagaactattaacttgcctctgagggttggtactgaaaagtaacattctactggtgtttctgctggataaagatagtgataattgtgatgatgatgatgatggtggtattaatgatgatggtaatggtggtgatgaagatgatgacaatgaaaataactatgagagtttcaagggaatattttctctagtgaaggataaaattgtggggatacgttgaatgtttggttctttgctaattgttcatattgatgaataattgaagataattgtcttatctcttttctttcccttgtaatatatcatcaagatcacaaattttctcaactttttcatgtcataggttgacaaacagatatacctatttaattttgttacttttagactccatctgactcatagcccattaaaatccatgtcttatttctatgtagcctcctgtaatttatacagtgtattaacttaattcttattgtccaaatgaaatgctatgtattggaggttttttgtaaggcacccatcatgattatgatgttgaataattctccaggaagaaaatggtcattgagcaaaatggctcagcagtgtagagcttgtatttctcttccagagggactgagttcaattcctggcaagcttacagttaccatacagttctagagggttgatgaatcacactcatacacataggcatgtaagcacacacagatacagacacatatgagtttttattgttatcaaaaacttgggttattgaaacatccaacctaagcttctgtttgttgagagtgaactgcatccagcacatgaagatttaagcaacagaaacagctgggcaattattctaagcaaataaaatggttggtaggaaaacttccagccagagtgagtgcactgcatccatgtcagatttcaggcttctcttgctgttgttagtcataagcacaaaaccatcacagactagtggaccagaagtcacaaacatgaattacctttcagactagaaacactcagccctaaagtgaagctgtgtccattggagatattcctatgcttcccccatcctctagagcgcatctaaattctttccttcatagattccatcttaatgaaaaccaagcttcaaataccaccccctacttctgttttttcagttcactccttttaatgaattcttaatactttggaccatccacacaatctagagtaaattctctatttaaagatccttaatgattcatacctgaaaatgatcttttatgctgtaaatattcaaaattttcagaaagtaatattccatctttgaaggactatgaaaatgactgccacactctttttaagatgttaaataatctaagtaattttattttactttttacaaatagactttaaaattaatggcaactgaaagaaaaatatacacaaaatttgctttcatctttaatttctttatgtaatgctttatttgaaattacttgtcagctttaagaacattcaaaatataaatacaaatttcctatatgcttttatgtggcttccctacctcacttcatccttccactgcaattattgtcatgtctcattagcatctatgatctccagccttagttttcatgactttgacattttgaaagatttaccaattagtttgtagactatttctcagtcagatttgtgtgatatttcataattaaattcataggtaatgctgaacctttctcagtacataacaccagacagtaaatggtctcagagtaccttgcattaatgatgtccttttgatcagtagtctaagtagtttctaaaagtttctataggtgaaagtttctatgtcccacttttgatgaatacttacaagtgagatgaaaggtacttgggtcattaacaactagctacctgaaggaataataacttcactttttctttaaaataaaattcacaattttatttaatactaatacctaattatactttaatctgggtaggaagaaaatatttaagaatggggaaatgtttgttaaacatttatattatattgtaatctttaaggtggagatatatatacttatatacttaaaaaagagatatctagcaaaataccgactaaaaaatattacaggagaatttctccaaaaatttttacaacttaagttgataataggtttatattcatccagtatttttattctcattttcaaaacatctgattaatccccatcttccccaggtctttaactatcatttcctatatgtcctattaaaacacaaagctttgtagtatttcattattcggtatttcatattcatatatcataccatctaatcagtggattaagttattaaaatcaggatgcattacccataacatgcatatgcattaaaaaccagggattcacaaattctcctaaaacacaggaaagggaacactgtcctttgagcacattctacatgtgctaatactgaaataatataaatttgaagaatgtacctcagtggttcttaggaatatgggtatagcagtatgaacgaactatttaatgtaatataggaatgcataaaaattacgatggttcataacaaggtagaatttttacctacaacagtttaaaaagcatttaaaatatcacattatctcaaaagtgaaagggaaaatacatagctatttgaatacagagaaaagtttttagttgactatatcaagattaaaactctcaatgaagtaagacaagaaggaatgttcctgtgattggtaagggacatgcacaaaatccctgctggcattttgcttactgaaaggagactggagtcttctgactaagctgcagaagaggaggaggctgtcccttcttcctcctttaccccatatggaacaggaaatccttaccagggaaattatgcaaaagcacatgaattacaggcatctatatagtgatgggcatttgcaatcatctcttttagcaaatgatgtgcccccccaacttctcttacaatacatttatctaactgatctaattgtgctcacgttttggagtatcatttggtgctttgatatgtgtgcactctgcatttatttcaggaaaggtatttatatgtgtctcctcaaacacttgtcagttctattagtaaagcaattgggatcctctatcccacctgtcttgaatgtcttgaacactattgtagggagacaccctggccccacccaatagtcctgggacaggtgccaggtggacccgggactcacccataacgtgtggtgaaggaaagccagggtgacgtaagagaagcttcttaagggctgcatatggagaccctggccccttctctctagccacgctaggtgggttcctgtgacctcgctctggcctgcgttttgccctggtgctttcttgaataaagaaatcttaccatcacggactacagttcatctttgagcgcacgctgcacacaataatcttcacactatcatacaaggcattaacctgactgccctactctatggtgacatcagaactcatttcccccatgtaactggagcttagcaccctttaattagcatttcccaatccatttcctcattctcccatcttctaggaggcattactccattctcaactgctgtaaagtcaacccctgagattacttgtaaactaagagaacaggatactcttgtcaatagctgaccttttgtgttgtgttgggacatgctgtgactgaagagaatgtttcctggacatctgtagggtgtaggtaggctactcctgcactgattttttttttttttctggatgatctgtccatcatttaaagagagattttaaagttctttgctcttattgatttggcatctctccccacttaaggtctttttaatactggagaatgcacatcaacaacaaacatacatatgcatatatatgcacatatataatcataaattattgtgattgaatctgtccctttgttgctatatgacaatcattccttcttattctttctactggccttaggtttccttaccatgaaatgtcttttttttttttccatctatgtgagtttatatttgattacgacaaaatatctgagctagggattatagctatagaaaagaagtttgtgtaaactcagttttggaagctaagcatccaaatagcagagttgtttcctgatgaggacttgcctggctgagtcccatcataatggcacaactcaggccagtgtgaaagaggctgatcacctgggaatgacaggaagccaaacatacaacagagggcacactgctgtcatgtgagatcttttaaaagattttccaagtcatgctttcagtaggttaaagactgcccaaaccctcactccagaggtcctggcacctctgcaaatctccatgctgagggccaagcttccaatatgggattcttgaaaaagcactggcctgacatatttgttctatgattgacgtagataccaactgaatttattgcctttggtacataatttttctataatttaaaacaaatatagtttaaatatcatatgatattgatttcaaaacttatatagtttttaatcttgattttaatatatagcatccctgataaatgcagtaatataaattctgtgagcaatgtttggtgaaatactttgaccaggaaaatctgaatttttaggcatgaaaatcacttcactaccatctttgttgatctaattaaaaatgaactgaagctatgcatcttcaaagttggcaaaattgcagtttttgttgaggaagaaaaattagaccatatttcaagaaaattggttagttatatctgaaatagaaggtttgaaaattctgcactagaatatctataagaagtgatttcttatttctgttcacttgccacctcaactagcttctctttgaaggaatcaaaaattcctcatatgaggtaattatacgggaatatatactgtagctaaaatgaatctatatggataaatatataatatcaatgaggaaacataaacagactgttataagaggctatgtgtagtgcattttaaatgtgtaaatgttgcctaaaggtttctattaggaaatgaacgactgctacacgtacttcttacttctggccagtgtgcccttgtaatgcattctttcagggggaagttttaaagaagcttttctcattgagccaatttggcagtaggcatgtgcactcagcattcttccaaccagcctactgtactggtaaaggatagaggtttatttagaacatgtaacttggctttaatagctaaggtaaatatggtggagcaacatcaaagaaaaacaaaagcctttttaaggggtactgtggaaaaagagcaaacccaaatttgaatcaagcacttctctctctgtcttccatttatccccagcaaagaacaagaaaacatattatgtgaaagcagtgagccccatgttttagggagagaccctttgacaaaaatcagtagtggattgctcctgagaaacatctgtgcttgattttggtctccacattcacgttcatacatgtgtacccatgcatatatgtatacaaacaataaatgatcaaattgtatcaaattttacaaggaaaaatggattttactgaccctttatgacccagaaaagcactcaaaaacatgaacataagtaagaagcctatgtggtttctaacattaatgttaggtaattatacaattgtgtttaatgcctctgcttttagtaaatatttaactatatttatatttgactaactcatacacacacacacacacactcacacacacacacacacacacacacacacacacacacacacacacgtacccttctgggacagaggcatagaaggagggccaaaatgcacagattgagaatatagtatgaggttaaggttaatatgcatttggtttagcttgtagaagctgattacacgagaattccaatgtatagttaatatcaatttcattgtttcctaaaggcaagttaagcaggctgaatacagagtagggagacacatttataacaaagttttaaatagtatcaaggcaaatcattaatttgtttgcaagtttgggaaagctatggtttctgaaagcaaaaggtacttccctcaaaagcttttcccacaatcaaaaataaatgtggcctagatccaaatgcaagtctctatagtaatgtagatgggttctttcctggactcacagcatggggaaaactattatgcaccgtggtttggtaaatatcgcaatttatttaggtgaaaaatcatctcattctatgaactgtaagatgaaagagtgccttggccaagtagatacctggcatgagattgctactttgaataaatgtatctcaaaagaacataatccaactgacaaatggattccaaactgacatgaaaataaagttaatgatctgcaaatttagaagtgcaagttgctaatgaatattttaacatgttcaacattcttagctatcggggaaattgtaacacatgtagagtcttgtggtgtgtgcttgtgtgtgttacatgtgagtgaggtgtacatgtatgcacattcatatgcagggcagagagaaagaagtgagcaaaaatgtggtcaaaattgtcagtgtgagtattccaggaaaaatatgaaacaaagacttaaagtctgaagcaaataaacctgaaatactttcaaaaatttgatgatttctactaacacacatattcaataatgtttgggaatacctggagaaaataaaaaaaagaaacagaagcaaccacaaaaatttcttggaaatcaaaaccaagaacatgtgtactgaaggaaaggaagagagaagagaaacccacacatcaaaacagaaaaactacaattgacttctcatttgaaaaaaagttattcattctttttttttaaaaaaaagaaaatggaataaatggaatcttataatggcaagcagaaataactggaataaatcatcaactctcagaattacaaacatgtcaatgatcttcctaaagtgagggaaatgaaaacttgctgaaaatggtgtgtgtttaccggttcatagatccaaattcaaaataaccacaagaagtcagggcatagcaaggtagagttattagcctcagaaatcaaggaaagtatgcaatgctgttctgaaaaagtaagaatatgcagatttattcagggagcctagacatatttatataggcaggagtccacccattcctggcaaggtcagttcaaaatcgtaattgaaaggggaaagaggatagaagtgtatatgtgtatgtttagctcgtggtcatggcacacaaacataaaagattaaagtgctgacagaaatgcttcagagaatactctgctaacatgggaaagatttgttgaaattaaaggacagggaactttcaggcactttccagggaattaatcctggaattcccctcatgattgtgagtgccttgcttagtgggtcacaaaactaatctaaaagatgaaaattttaattcaacatattagatattcagatagcaaaaccaccagtcaatcaacttaaaaagcaattctgtttaacaataatcctgctactgtttcagggtagaaggacaggaagaaaaggtggaagcacaaaaggaaagattctgtgatttcttgtaaatgtagagttctcagtaaaagtctataactccatcaggggtttctcagaagccatgaccacatccacaaatcagtcttgtaacagtggccctgatttaagcagctttggctatcagaacagggtaaacaaaactgttgactttaacaacagcacctccaacctcacagtgttgccatctgagaaaggcaggatgaatgctgttgatgattaccctgggaggaaatgatcctgacttatattagtttctctcttactgtgtctttacaagactaggcacagagctctccagtctctgctcttcacaaagacattcctcctacctcggtgagtgtgtgtgtgtgtgtgtgtgtgtgtgtgtgtgtgtgtgtgtatgtgtgtgtgtgtgtgtgtgtcatatatacatgtttatgtatatatgtgagtgtatatatacatattattctgttattaatgctgggatatcctaaagtcatatgttgaacttcaaagtctattatcaacacacacacacacacacacacacacacacacacacacacaaagaatgaggaagggaggaagaaggagaagatagaattcattatataagtaatgaaagtaaatgcagtattataatctgtctccccgtctctcttcctctatgagcccatcacccccatacacacacaactaatttctgaggatggaagtaaacatcctggtcaagaaaaacattgtcattgatctactgaactgccattaagtgtttaagtgcctggaaattcaggcttccagcgagaatgtatggaatatttcaaagtacagtaaatatttgcacctgtgtgttggacatctcttctgaaaccattgttgactaactacacatagtgacttactgagaaagggttaatctcatacaataatgtgacactgtgttacataaacatgcaaaattaaaatatatttcaaaatatatgaaattattaaccctttattaaagctttagtttcattttcactaaacttcacttccgggttgatgaaagcagttaaagtttgtgcaacttgtgcatatttctctttggaatagaatgattcttagatgtttataatactttttagctgtgaaaattttgtcttgtactttttttctccctctaatcactgtagtcttaattaggtaaaccttaacaactgacattgtttgctacccacttaattatgataaataaaagctacaggaaagaatatactgtattctcaaagaaataaggctctttaatgagtaaacaatggccactaaacagcgcaaactgttgtagtatgaccacttatttaaaaaatgtcacagagagtttacagagaatacaatttaatagattaacttcaatagcatattcaagtgacaacatatttagcaagggcacacaaagaaacacaagaagtatatagcttttctatattttggaagaaagtaaaagttttcagtttagattttccacatctcaaagacagataattaaagttaactaatactgaacagaaacattgtatagtatgcatagtaatttcctaatttggggttagctattttcccatgaatacatataatatttggcgtgtcctaggtgttctagataacatatgcatatagtcaccacatagtgagcctaatggcagtctcctctccactacagaatactgacatgtctgctgagttgaaatgaaagtgaaggacaagacttcagttacaagataaaagggtttgtttcctaaaacgcaggcatagtcactattccagctccagcttaccaccaaaaaataaggccactatgaaaaaccaactgatgcaatgtcttaaaaatgcaccaatttcctacaagtcatttaaaaacatgataatgaaagtacatctcagcagagatggtcccagtactcctggattatatccctgatatttttgctatttggatcttaacttttaagccatctttcacacaaacatgtgcatataaatttcagataattattctgagattgtgctgttactagaaaatgtaaatactaattccacagttcacagtttcatatcgtgatgatctattttgttcttagctgccaattacagactccagtagattaaaaaaaagtagaacttaaaatttgcatacctttcatcagtctcagttgatcatgaatttcatcttatttcataaagtttataaatagaagaaaatctgcaataaaaacaggttctaaaaaatccacattaaaatattgaaatgaaaataattttgagtgaaaattgagactgtcttagggttttattgctttaaagagtcatcattccaatgataactcttacaagagaaaacatttaattgtttcctggtttataatttagagggttagtccattatctgttgtgggatatttgtatactgtgtgacaatgtattcttactacagttttctattcactaggtcttcctagagccttctcacttaaccacctacacaaacaaacatccttccctgctctcttattagaaaatatatacctaatgaaaggaataatacagtaataataaaacaaaagcaaacaaatcagaataggatgaaacaaacagataaacaacaacaaaaataacagacaaaatggagctggagcaaaagcataagaaacacataaatgcggagacacagcaatcccacaaaaacacaaaactggaaagcataatatataagcaaaagacctgtaaggtgaaaaaccaaaatactcagacaaagcactatgagacaaaatactcccaaaatagcactgaatgtatttggtgcaggccatcaactgctcagtatggacataccctgaagtgtggtttgtatacccaatgaaactccactggagaaaactaatttttcccttaagagtgcttgttaattggtgctagtagttaggtactctcgcaacatttttcgtcacttttgcactagtgtatattgcagagaggttatatttgtagttggatatgtgtttgcctttctcctctggtaacatgtagacaacttttagtacatgaacactagtcagtaggctgaagattctaggtaggtaccagctcaacttctctatgataagtgagttatgtaggtgctatcttcagcaatggggcattaccattacattttggataacatccaacagccttggcaatagcctgaattgtttaggattttccatggagccccttcagccaacaactcaattagatataattcatgtctcacactagaggtttcatttagtggcaaaagatgttcagtcagggctttgtctccccattatctggtgatacaatttaggtttatttcattcatgaatatctaatctttttagaaaattctactgtagtaagtttccaatgaagtcctcaaattactctttgttttagatgtccttctccatattacttcttagccccctttttactctgcctccattttgatcctcccttcccagccttttctctgtcaatccctaattattcattctatttcactttcctaggaaggtccttcctctcctcttagtccttactctgttcctaacttctgtgattatatagattatagcaaatgatcaaagaaaaggggtgtccttccagaccaggctgactttgctttcaaggaaaccctttcatctttgcttgtcagcttacaggtttttaaatatgaaccacaatacccaacttagattttgtttaattttagaaaagttacattttctaagcttaattttctatgcttgttataatctatgtactttattaattaataaaattaatgattatttgaaatgcctttcattgtctaggcattctttggatggtgttttcccacagtgtgtttctgcttcctcattagtttctctagcacatcccataatacttcacatatttgaacaaagttttcaagagtcactcttatacttatgtagcatagttgaggcaaatccctggcaaattgtttcctttcctttcagttatgttactctagatcctcgtcaggtactggggtgtgcaggggaggtgagaggaaatacacatcgtaagtaatatgacttaccttacaacatttttattctgagacagggtttctctctgtaacatccctgactgttctggaacttactccatcaggagggcagagatccaccctccaccactgctagcttgtaccaccaacaccaggcacaacattttcatattaaacaaattcctagaccttgatacatgtcctgggtgatacacagttatctttcttgtgaggtctgtggagttactaccacacccatgtagtctgacaatagacataaaaggattagttcatgcctaccactatcctattttagaaattataggttaggtcatatttcatgtgttcatctgatagaggcatgtgaaaaccgtccattttctatgacagtaaaagaccttttagtcaaaatttggcaacagggatcaactgatggggaatgcagaatactgccttgtttgccagaggctgagcttgaaaaaaaaaatggatccctcaaagctcttccccaaattgtcatattacctatattttgggtttttttttttttttttttttttttttttttttttgcttgtttttttgagacagggtttctctgtggcttccgaggctgttctggaactagatcttgtggatcagctggtctcaaactcacagggatccactctgcttcctgagggctggatattacccatattttaatacccttttggttttccttctctcctttctctattgctttcctcatttattcacatacaaatgtacattataaaatttattacattaccatattagtttatttaataatttttcctaaatatgagcaaagcatgactcatgactaattgtagcagaatcattattgaattttccaattctaggggtacatttgcaggaagatgctgtttactggatgacatttggagcctggagataggctttctcttgtccctaatttttcttcctctagcatctctggttatgatgtagtagcttgggcagtgtggctgatctgggatcattaagattaaaaatataccatgtaagcaaaagaactcacacactgatagaacagcaggtgcctggagggttattaaaggtaggcaaaacgttcaaaatatctgcccttgccttttatgtagataaaaaggcaaacttccaaaggcagaatttgatctaaatctgtaacaagttgggaaaataacaaattaaaaaaagcaaataccttgggctcacaagaggtcatttaaaattgctcaagaattaaagtaacttataagccaaaaatttttaaaagaaatatgactagaattaggaagagcacattgatagtaaatatgtttcatcacctctaagcaattagtaattgtttataaagactcgagtatgaacttacagcttatgaataaatgagtaggggtgtctctcatatgcagccagaatcaatatataactttatggaaatgccatggaagtaggaacagatgtgaactctgagacaaagtgagtcctccaagtacctcactttgcaaaacagatgttggtacatgatcttggtgtttcttctatgaaacatgtgcaatccagataacttattaaaaaaaagttcttagaagtaaacaagaacaatggtcatcactaaaagaaccttttgctcaaaataataataaaattaggatgataatgttgatgctgtcaggtgctgaacccaatatcatttcagtggtgtgtgtgtgtgtgtgtgtgtgtgtgtgtgtgtgtgcgcgcgcgcgcacacacacacgcgagcacgcaaacagtatttagtatttatatgtgaactattaattactattactctatctatatatagatatacatatatatttaaccctgttgttcctattgctacatggggcacataattgttaattctataaaagatattgctgtattataagatattttacaagttgaactctgttaaactatgtaatatgaattctggcatagatcctgataaattccaaggccctggaaaaaataacacattaactgttgggataccatacctttctattcagttttcttcctttggaaaatctctagaacttaattaaattcttaaatctcttttcattcccttactttctcccacacaccattgaaataagcattaaacctagggtctagctaggcaagcgttttactgctttttttttttctttgttttatttgagacaaagtattgcatggtttagcttggggaatgtgaaaagtgcctatccatgtaatgtaggagaccaaacttagatcacaatattaatatcactgtggtcaaacatgaagagtagtgctttactgcgcttgcttacaggggtgtaatgggagaactatgtacaagagaatggagggctcagatgcacccacatcaccaaagatcctgcaccagcatgagtggaatctcctgaaatcacccttggaagctttatatgccatccacacaagtaaacaagacacaggtttccttctggaatcttggctgctctggggatttcctctctgcacaatgattattactgcttatataagctaggggaaggagggacctagtgaacctggtaaatttcagggatttctctagtctagtagattgtttcctcccagactctaaacaagtttctcttctgaatgtaatattacggtttcagagaaattactacataatatacagtaagacaaagtttctcagactgtcttcgaacttgtgattctggaagcttcagctttcagagttattggagttacatatctacacaatttggtcattaagtggggataaggaacactactgtagcttaaatagtgacttgatcttaacatactaataatgggaggcttcaagatcccactacatccagaagacatgttatctagacaaaaactaaacagaaaagagctgaagctacctgaagtcctaaatcaaatagaaataatagatatttacagaacattcactcaaacacaaaataatatacttcttctctggacattgtggaactttctccaaaatcgaccatatacccagatacaaagcaagtctcaacagatacaagaaagtcaaaacgacaccctgaatcttctctaactaccatggattagagctggatatcaagaaaacagaaacaacagaaagcatacacatatacacattcttggaaattaaacaactcaaaacagaatgaaaaatgggccaaggcagaaattatgaaagaaattaatgatgtttcagaaagaatgaaaatgaatagacaacatacttaaaattatgggaaaaaatgatgaaagtctaagaggcaagttcatagtactaagtgcctaaaaggagaaattagtgaactctcatactattaacttaacagtacacctgaaaagctctataacaaaaagaagaatgcacacataaaatgagtaaactgcaagaagtaatcaatcttagggcagaaataaaatagagataaacataaaaacacaaaacaaataatcaatgaaaggtttgttttttgaaaaaattaatattattgaaaaacattcaaattaacttaaaggcatagagagattatcaaaattcacaaaattagaaatgaaagacaggatataacaacagacccagaggaaattcagagaatcataaagacagactttaaaaaccagtattccatcaaattggaaaatctaaaagaaataggtaattttccttacttatatcacctatcaaatttaaattaacatcggataaacaattaaaacagacctacaatacttagtgaaatacagcaggcattaaaattctattaacaaaaataatttacaggacccaatggttttagcaaagaattctatgaaacttctgaggaatagttaatgtcaatattcctcaaattattccacaaaatagaaacagaaagagcatttaaaaattcattttatcatgccacaattaccctgatttttgaagcaaatatagatgcaaaaaagaaaaagaataataaacaaaatttcctaaagaacacagatataaaaaaacaaatcaataaaatatttgcaaactaaattacctgccagtaacataaaaacttggcttttaggtcatatctggattgaattcactgagtcctgtgtctcaattgtgtggtgtctttagctatagagacttaccttccacctgtgaggcatttaaaaaaaaaaaaaaacaacaacaacagtgtatattgttttgggagtctcttgaactctccataccaacagctttttattaatattttttcatttattctatatcccaaccacaatatcccttccatgctctcctcccattccctctgcccacctcccctccgtaccttccccttctactccttctctgtttctgttcagaaaggggcaggcctcctatgagtatcaccaaagcatggcatatcatgttgagatagtactaagttactccctttatgaagactgggtgaggcaacccagtatgaagaacaggtttccaaagccaaacttaagcaatagggataggccctgatcacactgctaagagtcccacaaatagatcaagctacacaactgtcacacatatatagagctgctaggtcagttccatgcaggatccctagctgtcaacttgaccaataattttaaaagagggaaggtacatgggatggaggggaaccaggtataccaggtaggaactcaaagttatgaaagggacaggtaatcaaaatgtctggattagacaaggaagagcctctgccaggaagggctgcccagcttctggtatggaatgttcaaggtagagggctgggtatgccaggcatactctgtcacaggtaaggactgagggatgctggaataatctggtggccaggttcagtttaatatgttaaataggcacctcaaccattttctctgggtttgaaacataacactattaattaatgttgacttactaaatgattcatagagaatcttcaagtcctggaggcactcagaagtagggagataattcaccaaatttgatttactcttccctgggcttcttatctacaatctttaagaaagaacaagcaaatgagaacctggaaatgcaagacagtggtagaattcttctctactgtacaggaaatctgtgtttgatccctggtgacacaggaataattattataattatcaaaatacaccaatttaatgtggattccaattgtaactctgtttcatcttctttaaataaatttataattggtgttgctcactgaaaaaaaaatttgcaaactgaatccaagaaaatatcaaatagttcatccaccaggataaagtaggtcttatcctagagatatatatatcatatatgagacatatatgaatacaagtgatacacctcagcataataaagtcaatttaaaacaagcctatagccaacaccaagttttggagagaaacccaaagaaattccattaaaataagaaaccagacaagattatccactctctccataccttttcagtatagtacttgaactcttagtgagagcaataacaatgagatcaagggaatacaaattgaaaatgaagaactcaaagtatccttatttgcagatcatatgatagtaaacataagtaatcccaaacattaccaccaggaatcttccacagataataaacactttaaaccatgtaggtgtatacagcattaactcataatagtcagtagctcttgtatacaaataacaaatggattgagaaagaagtcagggaaacaacaactttcacaatagctacagataatacaaaatatcttgggataactctaaccaagcaagtgaatgacttgtaagataagaatcttacaagtgaatgaataaaaaattggagaagatatcagaaaatagatagatctcccattctcagggatcagtagggttaacataataaaaatgttcattctaccaaaaggaacctacagaatgaatgcaattcccatcagaattctaacacaattctttacagttcttgaaaggacaattttcagctataggtggaatcacaataaatctaggatgactaaaagaatcctaaatattaaaaaaaacaaattactggagttttcactatccttaacttcaaatgatactatagacctataataataaaaacagcatcgcattagcacaaaacagatatgttgatcaatgaactagaactgaatgatcaatagaatagaatcaaagacctagacataaatctaaaaacctatggacaccagattttcataaataagccaaaaatgtgtagtggaaaaaaccaacatcttcaacacatggtgcttgtcaaactggatgactgcatgtataataatccaaatagatccatatctatctccctgaacaaacctcaaatccaagtgaatcaaatacctcaacataaaacctgatacactgaacctgatagaagaaaaattgggaatcacactgaaagcattggcacaggagacagtttctctacataacacctctaatacaggcacttcaagaattcaaggtcatccaacactgagatcaactctaaattaatgggattttgaaaaactaaaatgcatcatatggcaaagacattatcattcagacatagcagcagcctacttaatgggaaaatatttttaccaaccacatagtatcaaaaataaataaaaaacttagaaacatagatatcaaaaccccacaagttatccacttaaaacatacagataattctcaaaagaggacattaaaatggctgagaagcacttaaagtagtattcaacatctttagtcatcagggaaatgcaaatcaaaactactttgaaatttcatctttcacatgtcaaaatggttactatcaaaaatacaagtggcagctcatactggcaggatgtggatctaggggaacattccttcactgctggtgggagtacagacttattcagccactatggaaatcagcttggtggttcttcaggaaatgggaattgtttttccttaaaaaaaggctgtactgctcctggtcatatgcaaaagaacggttaatcctgccctagaaacacttgctcaatcatgcttattgatgcactattcacaagagacaaactggaaacaacctagatgtttctcaactgaagaatagacaaagcaaatgtggcacatttcctcatggaatattattcagatattaaaaaattttcatgaaattcttaggtaaatggagagaactagaaaaaaatcatcctgagaggtaacacaaacccagaaagacaaatgcagtattattctcttatatgtggatattagttattaatcaataataagcaattttctatccctagagttacaaaattaggttagggactggggtgtgggaatagagaaatctccctagaaaggggaactagaatacttatggatggaagagtctggattgggaagaaagagggggacaacagagagacatctgaagttcagggacatttatggggtagtatgtaaacttaatgcagaagaaatttcctaatatatgtatatatacacataggaaggcaatctaaattaaatctcctgataactggtgagacatagctccaactggatatctctttctaaacaaatgaagctactagtaccagtaacacggtacatctaattgattttttggccaaagttgttcaacttacaccaccaaacaaccttggctgttaaaaaaaactgcatatagttctacacaactgatgacaaggccctgttgctgaagacaacacctacacaagtcactaaacctggagaaattgagcaggtactcacataaacccttcattcccaatgctagactctttggtacagaaagtattctgaatcttaccaaaggagaaacataaacaccttgccaggtataaacactttggtctatactagtgaaatggtgtcacaaattttgtgagcttaattaaccaatatcttatttgacctaaggcccactgcacaagatggaacacatacctgacactacatggttgggcaaaagcctgagactagatagcccagagatctaagataaaaccaaatactactgtattttttttaatttttattttcttaatccatagcaaaaaaaaaaaatgactcaaaatgacatcctatactcagattagtgccttgcacagccataatcagagaagcttcctcttgcagctgatggtaataaatgcagagactcacagccagaaaataggcagagaatgagagatcttagaacactcagccctaaatgggaactttccatcaaatactccacctcagggttcagggaactaaccctggggaagaggaggcagatgaagtgtaagagccaggaagagtggaacaccccaagaatccaatgccctctaaatcaataggatcaacacacatatgaattcatagagactgaggcagcatgaacaggtcatgcacaggtatgtatcagatagagtccatgagctgaaagaagtggaaacacattcccatcccttacttagaagctattttcaactgataatcactttcaaatgaaaattttgttttcttcaaggaagtcgtactaggaaaacaaactccacttacatgtaggctgtgggctcagcagtatatagacaacagaaaatgagctcaatggcatctttagagctttcttgtgcctgtataatgttgtatcagagcttttctttctcaaaaatttttcttatttttattacacacagacacacacagacacacacagacacacacacacacacacacacacacacacacacacacacacacacacacagagacacacacacataccccaacaggtcctttgcatataatatgtcttccagataatcatttaattttattatttttttttcattgtacataccaaccatagttcccctccctcaccttgtcccatccaccagcctcccccttcccatgccccatccattcctcaggggggtaaggccttccttggggagtcaagaaagtctggcataccaagttgagacaggaccaagcccatctcccctgtgtcaaggctgagcaagatatcccatcatagggactggtctccaaaaagccagttcatgcagccaggatagatcttggtcccagtgccagctcttccccccacccacacatacaaatcaagccatataactttcacccacattcaaagggcctaattcactcccttgcagaatccccagctgtcagtacagtccatgagctcccaccagctagggtcaactgtctctttagttttccccatcatgctcgtgagccccccttgttcataaaatccctcctcctcctcttcaaccgaactctaggagctcaacccagtgcttggctgtgagtcactgtatctgcttccatcagttactggatgtaggttctatgatgagaacaagggcagtcactaatctgatgacaggggaaggccccattcaggtacctttgccagtactgctaggagtcttagctgggattatccttagctgtgcattgctgggaatttgtctatcgccaggcttctctctaaccccataatggcttcctccatcaagataactttatcattgctctctccctctgtccctccccgaacttggcctaattgatccctcatgttcccatcccctatctcctccctttaccccctccccagtttacccagaagatcttaactgttttccatgcctgagataattgtttttatgagattcctgcgtataagaacaaatggctcagtgtttgtaagtatttcctgtgcctcctcatggactcttttccttctgtgtgtttgttatgttccattctgatgtgctaggctattttttttgtttgattgttttttgttttgttttgtttttcaagacagggtttctctgcagctttggaggctgtcctggaactagctcttgtagatcaggctggtcttaaactcacagagatccacctgcctctgccttctgagttctgggattaaaggtattggccaccactgcctgactgtttgttttttaatcttactttattttaagctattttatcattatcatccttagaaaccttttctttctctcattctttctttcttcctttctttctttttgataacacacagaaagagggtggatctggaaaggaagggaaatgagtaggaactgcaagtatagagggagggtaaaccataatcatgatatattatgtgaggaaaaaccagctattttcaataaaagaaaagcaacaacaataaaacaaaacaatcaaaacccaagaaatctgttaagcaagttaggtttgcttccttttcctgaacttccaatactgattcttcatcattttctcactttgagcagaataggatatagtgtaggataacaatttaacagtaaggaagcaataacaagactttctcttttgtggtcttgctttctaccttccttacacagctctttaatggcaaactcatattccttcccttgtgctctgtggtaatattcattgcagacatcaccacggatgtgaggtctctcccttaattaagtactaaaaggcttcatttcctaaaacaaaagcatgtggcaggttttattgatcaagtctgtgtcgccagctgcacacattagtggtggttattgatcactttggcggtaatgacttgggttccctgtcaggtggagtacacattcctgggaaatattttcttacaactctctaatatggaagtccatgcttcccatgatatacactatagcatctttgaaagcttttttgccaatgaatcattctttaaaaatatagcagccatcatttgaaaggttattgtctctcatcattgtctttttaaaaattcctcctgaatgctaatgatgtacttaggaacttagcagggtgaaggcagcctaaagaaccacaatctcgtatggattaccatggtcttgaaatgttctcaagcaatcatcatcattagcttctgaagaccaagctgagggagctaacgaggtcagcttacccatgttcaatagccaggatctccctgtgtggtttattgatgagttgatgaaaataaaataacttgtgtgttagtaagaaaaggtaatctgggaaaaaatgagttaatacatgacatttaataagaaaaatgatggtgacttcttcaccaatagaatgtatttctaaatattgctgaaatgtaccttgtcttgagaattctcctgcagaaatgaccaattgttgctctttctaatccacagccatgagatgtgacccattagaaggatgaagtcaagtgtctcctctcaatatgaaaacataaaagctgctacttaaccatccaggtttattacaagtgtactctaggctttaatgtattgaataacctcaaaagaatgcttttaagcatacctttaaaatagtatcagatcatataggttttaattgttctgtttgcatttggaaaattaagcattccttgttaataacagctctgccctggtaaatggaacaaagagatcctggtgaaaatgtacatggtggctcagttcagtaggaaaaacatccaagagaacattaacagatggctttggaagccacacacatacaacatcatttataaacacacacagcaaacacaaacacatgcagtaataaggcatatgacggaaagaccatcaaactgccactgttatagtaaagaaagcatcttagctacttaatgcatgtctgcttctatgtgtgtcatgctagacaaagtgggatttctgtctatagatctctggccaggctttggttcaccagggtccacagaatcatgtataaattcctcttcatagaacctcagtgactcaataatagtgtccgatctttaatccataagtgtgcctctgtaacactgccaccctgtcccccccacccccgttagatacacatacattagcaggatagcaagtggcttctccacaccctctttgctctgtcccagttgtatttgaccttttctccttgtggaattctcatgatctcatcgacctttgttaaaattgtccatgtggttaatcagatccaatacaattttcattgacactgaacatctattatcatctgatgtttggacatctacagatacaagccaagaaacacacccacctctacatcttccctaaacacttggagtagcaccttcatgtgatactccttttaacctaagagcaataaaggtgatagtctagaatgttcattctatctaaatacattgcagctctagtactttaacatttgctctctctcatacaacatcaactgagtgagctattcatgttcttttaccttatacagtccacacttcaagttgctctttcctaagctacagagttgaggagtggctgccttcattacttttaatatcttttcaaagcattatgcatgtcttctctgtatcaggtcctgccttctctcacagtcctaattctctatgcagcacggaagactaaaatgtagatacaattgcttcttcttaaaatagaaatactgttaccacagtcagatttctttcatgctttgtaaatttcctgtggacagtttttaacactatgagttatatgcatttgagttgttctgagcattggaaggaagtctgatatctttaaatgactattaatcttgtgtcttccatactaaaaagattaaattggagatcccataggccacaatcctgccaatgcaactacttttttgtactcacccagatatacccagtttgtacaatcaagggctataaaatcacaagaatcatttctttctttcaaaacagtttttagactaatgtgtcctgaaacaaactgaattatctgttcatctgatgacattcttttattcccaagtcaaaacactcatttgatcttttcatggccaagttttttcacaatttgcaatcgcagactcatttttcttgcacacttttcactgctccctgggtaaagaacctcaacatgtcagagttacagaaacactacagatagcaagttctgctcccatatgccagtatatcatcagtgctccacatggccctctgtccttttcgaaatattcttgctatgttctttgatgtgtgttatcacacaggtttcactgaagtacagccacagtgacaagagtactcgactctcatttgctgatttctttgaatacaagcaatcatccaccattgaacatgtccacactgtgtcactcctcttatatgcacaggctttatggtagcaatggcaccaagcattcaccatgacatatttgaagcagtatggactatgattaaggacagtgggaatttgaatgctcactctgaaacttcagtatgttagcagaatgaaccaaatgtgttttggctgagaacagatggatgcaagactacaaatatttaataactgcttatccttgttgtcatgaagagccttgaacatgaaaactccaagatcatctatgataattctttagaaaaaaagttaagaagttggatttcacttaaaattgtaaactacagtttattcagaaattatggatttaatgatatataaaattattaagacactttaaaatatgagacttatctcctctgttcctcccatatccctttggaaaactgtgctttgaagtccttcttctctcattccactttctcacgtctgctaacatttacaaaaccctttacctgtcttcatctcccaccactgtagacaaacagcccattattaaaatgagatattaaatctcacttggtagagaatgaaaccagagacctgaagcttcacggtatttgtaaaggtcagattttcaaaacccaggtaaacagtattcaaactcatgaggaaatgacccaaatgatttagaaatggtttaatatattacagttcaagtttctgttatttatagaactgtaataacttcagcactttgaactgctctattggatgggtcaagcagggctgatagattactaaaattcctcatgagtaagaaattcaatgttggactgtggagaaatacagcaagtggaaacagggcagggtctcttatcaggtgtcctcagggaatcgttattcagatttctcagtacaattcatggccttttgccgaaaaggaataaatccctcctagagagtccctctaagattctcctccaggcacaaataagacttggaagtttatcacaactactgaatctattgatattgttgggaaatcatcttagcaaacttatcctaattatgtgaaaccatgccaatgcaagaagaatccagaggttaagccagagttatatttgtgtctcttaagctctccaagatggctgttacccaggaaacatacctggctccttgcatggaactaccagtagagaaaagaattaagccctgaatgagaagcaagtctatgtagcatcctccagtttctcaatgttggtatataagcagaagtcatgaggtgacatctttccaaacatggagttgctgtacttagaaaatcctgtgaggttgtaaagatgaggaaagtttcaatatgtgctagtgaaatgtcctctggtgtaaaagtgacagcttggaaaacttaattcaaccaaaaagtgaaaaacaagaaacactgatttcaatttacctatcaatatgcctataaccaactgatgagtaatgggggatgctgtaaatgccacaaatagcaccagtgttgtctctgtaaatggatatcatcatgcctcggtgtggtgtgcatagacagccatattccatgcacattggcttgtctatcttgctgcttgggtagaaatcacaaatgattatgcatgtgtggctatgcaccagaggtgtgtgtgtgtgtgtgtgtgtgtgtgtgtgtgtgtgtgttgtgtgttttcatgtatttgtattgtgggatatataagtatgtgtatgtgtgtatatgtatgtgtttgtataatttcatgtagacatatgcatatatgtgttttgctataggatatttgtatctttgcctatgtgtgtgtgtgtgtgtgtgtgtgtgtgtgtacaaaggtgtctttatgtgtgtatatatgtgcttatatgcatatatatagatatgtgttgtatgtgtatgtgcatgtgcacacagtctgtgtttcttaccagtctatgttgatgaatatgtttccacatctactttctgcttgttaattatctgacttatttatatttttttgtactttctaggtaggggaattaaagagtcaatgttatattggcctctataaaatcacaatttaaattattttctagatagaccctatttgatgtgccatttccacaattttcctacaaatagccatatacaaagatttccttaaaatgctcatattttttttgagaaaaaatactgctgtggcataattgttgacaattatctgttctagcaagcttgttaagtaggggtgattaattttgcagtaaagttcatagctacatggccttgaaggctgtgactaacgtggttttatctgtgaatcagtaattacaaatcaacaacatttctcacttcatgcatttgtatgttcaaagttctgtgacagtaagttatgttgtttatacttcaggcacttcactacaaaatgaacaggaaataaggggactgtgttgtgaggaagagtccagcaaaagaggcaaactattcataagatacacatttctactcatgttaaaattattaattttatttattttatgtatgcaagagatttgcctgtgtaccatgtgcatacctggtgtctctggggatcacaagatattctgaaactggaaccatggcagttgtgagatgcccttgggtgctaggaacagaattctcttcaaatgctcttggccacagagctacctttccaattcctttttcccttttccctttcttggaattttgaacaaacaaacaatgccaggaggtggaagtgttgactagaccatgagtcagccatcagtgtggatcatgcatacaaactaggatctgagagaggaagaacataagttccagagaacaggctccaaagcaagagtgaaacccaagacaattttccttgaacctgccatcccatataaacagccattgtatattttaagcatagttttgtacatacacatttgttccaagaaaactatataagcctatggcatatagaaaactacattttttacaatatgtaatttacttaatttgaagatacctatagttaatcacatctaagcacacaacacgtttgaatttctctgttttttatgcataatcggtgtttatagggtgcaacatgattttgtagatatgatagcagtattaacagaaccatagctggcttctcacaggtgtgggcagtcaatggttttgttttgtaaaaccattttcttgttcttcaagtaacgaccacttgaagtttcacacactgggttctgaatgattaacgaaaacttttgttgggattcatgaggatgcttcccatttattatcttccaatttatctcttctgtggaataaatagaggatgctgaaatgcttgtatgtatcagactgaatctggaaagaatgagtgtgcttattggttgagacactgggtttatttgcatgccctcacctttaaaataataacccttcagtattccctcaactcatgcagctctctgcattcaacatagacagcttgtaaagagggcagaactctcacagggaaagggtgatcagcccatgcactcatcattggagttgccagctaacagagagaagcatagcacatgttacatgtagccctggacagctggaactcccggtggctcctgggaggaatggattccacacagccatctgttctctgacatccctgacattctagattcgatttgctaccattgcaagtcaattaaggatattctgttttgaacagggcacacaaaaataaaatcctcccccccaaaattacctgatttttttttgccttattcgctcaacttgggaatagaaatgaattttaaaacaaagacaactgtcatatgcctctataggtttaagtcatgtgaactaacagattcctcacaagttatttacatgccaaaaatgggtgcctatgtagttactctgttggggaaatcacaggaccaatatttcctttccacaactgatttaacattaggaatattggcatctatcaaatgtgtattaaaactgaccattgaggaaattagttctaggtttacaaagctgcttttcataattaaaataaatcagggcccagatgtgtggcttattactttcacctggagggttatacaattctttcagcatgttgatgcttttgcaggatggctacaacttaattcatataaaaagataattgtgctggaaagattcattacaacaattagacaccttcatcagtatgttaattacaggaatatgtgtaaggtgatggaatggaaataatcactattgtacaactattcaaagttataatttacacttgagtgctctttttatgtgttcttggttaagtggaggtaattgcgtcctaatatatgaaaatgcaaataatgatttcactttgcaaattctctgatgctatagaagagtgtttgttgaaatgaccttaataatgatcttttgtggtgtataagtggattacggcccttggggaatattccacatcaagattggggagatgaataaattgtgctgccaattttctataaagcgacaaggttcccgtataacaatgtattattttgcttgtggataaaaagttcaacattttcttgagtgtgaagtagcaccagtgcattactgagaataacattgcccactaaactgctaacttagataaatgtcctatgatggctaatttttgtcagctaactgagagcttgttagctctcctaaattagcccattgactgactatgatgggcatcaaaaaacacagtaagattttcataaacagtaattcaccaatatattctcatgtttacctgtaagtgcaaaggatgtatcatatgcaaacatttaaaactaagtactataaacagttgttcattgccctgttcctcaggtcacctgtgagtttgggatcatcagtttgtctgtggtcagaatttaataagtactgagatgatggcatctggctatgctgacgctagccagggtggcagtttcaaatccgtgtcattgctttaggttgggttcatagctgctaaaacttgtgagaggtctgtgttataggttaggtatgcacaatatggatacaagatgctcactcatcatcagcagcactcattcatgagaaagctaggcagagggttgtcaaattctcaaacagaactgatgattcctcagccgatttgtgaggactctgtcatgaatccgctcatctaaacttcctgccttggtatagaatggatagcctccccagcccatatcactatgtgaatgcttctcctccaggcatagccttgggcaaggggcttctctgtagcacaagctacttcctcaagaggagacagctcaaggctgtcagcttattgatccaggtgctagagatggaaagtgtattcccaaaaggatagtctgtgagcagtgtctccatgtctgtctgtcttgccagcatagtagttgcccagctacaaaaactacacttaacaatttataagttattagcaagtgaaacattatttctcatatttataattgcatttaatcttcacaacgttcttactagggaggtgtgtggcacagaagaaacagtcaagcaaacaggaaatgcagacagcagaggctgccattagacagtgagcacaggctggtattgattgcactttaaagatgagctaacaaataagaatgtgtagtttagtttgttttattaagttgaaattacaagatttaagcacaaattttaaggaaaataacatgcatgttgctgcccccctcagtgagtctgggttttaggctagggggttaaactcacatatgaaggctgtgaaacctggcaggtatcagacaacacacttgaacaatgagctgagagatgctcctgtagaaggaagcttattcatcaaaaagtgcagaggacttaggactagacactatgtagcatggagctgaggtagagttaaagaaggggaaaattgcccaagaaagagaaaggagataggaacagcctgtaacacacacacacacacacacacacacacacacacacacacacacacacacaaaaagaagtttatagtgtacagctgtatgcatgtgtatgtacgtgttgtctgtattttctatcttaggagcagatggaagcagagagtaacaaactttcaggttgctaatataaaagtaagtagatacatctaagatgttcttgaaagtttagctgcactacactagaaaattattgactgttatttcctagaagtctacctttctccatcttcaactgtttgacatcaattagaagttaaaattgtgtccatgactttttaagcagtcatgtatgacacatgcactcctcctctgccccctaaaatgtgagcattgaatacaattagcccaggtgttcaatgcctgggagtagagtctttcagtttcacagtgacatctggaatgcaaagggacagtgttcagggtgttgccctggggacacaagaacaaaactgcatgctcttggaatttgagaagggcaatgacaacttttgctgtaaaacctctgtgctttctgcctctaatttccagtggaatctagcaaggacgatttttccctgagggaaatgcatggtctttggctgaggatggggcagcgattgtgagtttattattagatatgcctttttgaagtgaagttttaaaagtttctgaagttgtttaagtaacagtggctgcggggcacctgtagtttatctgctaaccatgtatgtatgttttatgaagctatttaatctacaattcacttttttacaaaggtagtcaccatagcaactgtcatctgaaagtttcctgctaacttttacacaaagaacattctgtagccaaagaaatatacacacaaacacagatatacataaatacaaatatatacttgcttggcttcaggggaggggcagctcattatttcagtcatttttttcttcttcttcatctcaggccagtgctgagaatggttaaatatagtcgaggtcaagatacctagatggcagcagagaaattgctggtgattgacatagagactattctccaaagtcttagcatttgtttctttttaataaagctacataagatgtcatgattttcctttgcattctagagtatacatagataaaacttcttgagaaactatactttgattttcatttaaaagaatccacaggaaatacagagagaatgtactgtactagtgacagaataatgctaaatacacaagaaaagcagttgggggctggagcaatgacatattggttaagatgcttgctgttcttagagtggactagtttcagttcctcgtacccatatatatccacaattgtctgtaactccagaactgggtaataggaaccttcttctagcctctcttggcatctatgctcatgtgtatacacgaacacacgggcttgcctgcacacacacacacacacacacacacacacacaaatacctatacactatattccacatggaatgagaaacctacattagtatcatctcctaagaattaaggaatacagatgaaaatagtttttgaaatgcagacctgtgctgggcaattaaaaaagcaatacttggtctcaggtgagtttcctctttgttggaacattgcttttctatctttgtcagaaatctctgtgtgcatgctaccaatgtagacgtctatctaatggacaccatgtgaaatctgttacatgcctgtcactccagcattcacatgcctaagaaaggtagaatctttggatccagactggtttagataatgcaacctgatctgaaaattacaaataattaaaaaaaaaaccttctagaaacaccaagctcagacacaagcctagtatccaagttttatttacctgactggccgttctctgtttgattcatctactttcaaaatgcccccaagtctataaaattttgaaaaccgcgtttctccttatcaatgtataggacaatttattctgtattcaaaagcacaccttgctgttctttgagttccacacctcagcccacttctttcccttgactggaacttatttcattccatttcttatgtttccacatcatttttccttaatgctcccttcctacactcaattttcttactcctgggcttgatttctatctcctaagcaacccttctaaattcacatctgcagagaaggagacattagtttctatttgttatccttggctcttttcacttatttttctcaatgatctgatctacttctattctgccattttaaaaacatgattcttcctctgtgacctaatgggcctgcattgatgacttcatagatgacaatgaacttgtacaattatataaccacaatttttcaatgataggcacttgcatgtggtattcctggggaagacattcatcaactttgtcagtttctaagagcttctgaccctcccaaagtttcaggattattttttctcatttttaatttgtagattgattcattatttttgaacaatattcaaatgttatctgcatcctctactgcttttgaaatgcccttccttcttcaatattgctggatgttggattaaattaaattcttcaatctatatgcattgtttacatgtgagaatggcttcattaaactaacttgattacatgtaaagaatttgtcatatttctgggttagtccttaaatattaccatttcacaagatatagttattacagtaaaggaactgaaattgatttcatgagattttgttttcatgcacatctacaatatatacaaagtgttaatagagaccataaaggaacattggatccactgtaactgaagttacggatagttgtgagttaccttgcggataatgggaacagatcgcagggcctttggtgtgcctaaccattgagcaatctttccagcctccttgttaaatgggggcagagaggcagaatttagctgtatgtatctagctggctggattacatgtcaggccagatagccatggctgtcctcaagcatccccctcggcaaagcaagggttattggttgttgtgtagctatttcctctgaactgaatcagtatgtctggaaaggaggaagaagatcctaatattcagtaaataaatataacttaacaggtgaaatcagtgaattaaacctacaaaaaaacacaaggccttgtggttggtagtttttcactctttgcatgttgggagcctgccacttagctcccaaataaatacttgtagccgtattctttcttatgaatgcacagctttaccttggcttgtttcttgccagcttttcttaatttaaaatatccaggctgcctctgggtttctgtctttctctatgtctgtattcctcttctttcatttgtattctgtgtctggttgtgtggcttcgtggctggcctctgatgaactctctcgtcttccttttctcattcctctttcgcctttttctccttctatttagcctctctgcctgcctgtcctgcacatccattttcctgccttgccattagccattcatttctttattagaccagtcaggtattttaagcagccaaagtaacacagcttcagagagttaaacaaatgcaaaatatcttttcatgaataaaatgttccacagcataaagaaatgtaacacatttttcaataatattctacaaaaagacctggctttaagattatcaaagcaatgacaattgcttgggaaactggtcacctctgactgggctgcctacaaggacagtgagcttcaggattgagctgtcacccacaccaaggtggttttggattatttattttcagtgatgcaactgcctttgagttattcatacccttaagagacctctcatccacactcctgtaagccatcccaataaataaatacataaaaagttctctaagctgttttggatggaataatttctttcatctgttgtttgtgctctgtttatacatgcccagacaatatcatgcagcataggcgaattactccacagccaggtagaaattctgttttctccatgtattttctagacctgggactctagatccctctgtagtagaatatttgttcttgctagcatttgcagtggaggaattaactcaggtccttgtacatgcaaaaaataaataaataaaaaacactttactagtgagctatatttccctggtattttcttaaagagataaattccaagcaaggaatgatgacaaaagtctttaatcccagcacttgggaggcagaggcagatggatctctttgagtttgaggccagattgacagagttccaggaaagcaagggctattacacagaaaaacatgtctcaaaaaacaactacaacaaaagaaagcaaaagaaattacacatagaaaaacaattttaaaagtgtgtacaataggattttgctgtaaaatgtgagatatccagttaaaggggaatatcatgaattaacaattaaattgtccataaaatagatgtttatgataaataatgaatattatggcacaattatgtctcatggaataattaaacaatcatatttacttttctgaaattaaatttttgtcctatttgtatttattaatttagataattcagtttatcacagagaatattattttatttaactacctttctttttaaaggatgcccagtagtaaaatatattccccagaatatatttattgcttgcatctctctttcttcaacatgtgtatactcagatttctaaaacttttacatttgatatcttttctgtgtcaaactcatttttctattttttgctgagaatatagacactgacatggctagcaaaacacctgatgtcgagtgatgaatacacagcataatacataaagagaattcacaaatagaatatctgagatcagtaaatgcagaaagaataagaaggtagagtaactaggatgcagtgaccagggtttttatgaaggaggccacagttatggagaaaacggggagtggtttcacgtgaggaaaggttgtattgctatggacactattagagatattgaattctgcttagacatttaaaatgcatttaacatttttcttggatgtcattggcaaattaaatttaaaggatgctgtataagagcaaaagcagggaactatccaggtggctctttcagtagtccaggaagcaaacacttttgggatgcacggggatgtaggaattggagctgatatctcagaactgacatcaggactcatttttcaagtcagagctcacaggctagaatacagggtgtatgtgagactccatcaaaacaagtctctagattgggcatgagggtttgatgaatagtgtggttttagagcatgtgccatgatgggaagaagaagaaccacacatgaaacctatgtgtttggctagagatatggttagaattctctggaaaaagaggaatgaccccatgtcctgatgtattaacataagtattggcatcatgtctccacttaaggtgtgtgacaacacatataattcattcatgcctgaggccagtcattttactcttcactgtatttatatgaaaccctacagcaggtgtctaataggtgctaattaaacaacttgcagttcattttctaggctccttcctctgggtaaaaacatgtaattgcattatttcctaaaatgatttctttcttgttgttactttcagccatacacttcttttccaaattctaaattggctttgaagacaagaaactatattttagattttccaccataattacaacactctacgcatacaaaacaaatatacatgaatcataaaaatgaattgaaaaaaatatatatgggaaggaaattatgtgaaacactataaagctcaccaccctccattgttttatcagctatgtaaatgatcaagatgtaatctgcaaaccatcttccgtgtctgtttctcactctgatatcagtttgtgtacctctgcagggatactggattttctgcactagccaggttactctgcagaatgaactgcttagttctccaagcagaggcaaacttgcccacacttgtcatctctctcttcagatcctaactcatgtaagtgtcctgtccttattgattaagataatgtacccatggaaaagacagaaatctgttaataatacctttctacaattagtgcattgtcacaatggagcatgccccattgtctctctatggctgggaaatttcactttcaccacagatgttctggtatcttcatttagaagagtaaagagaaacaggaatatgttttaatatatttcactctactaatcttataagtggtgcaggagagctcacaccacaagtgtaggattttatgcttctatctattttgcagggtctcatgatcttcggtttgtaaaactcttagaaacttgtatgaaacacagaaaaaaaatcaatacagatacacatattattttgtgatgttttctgtcagcttagtggctgcacatgaatctactgatattttaattatcatctgtgacccctcagtcagtacctaactggctactcaaacaatagcctagaaggtcttcaagtccaacagctctggtcagtcacaagcatgatatatagatttaaatcaagtatctattgttctatttatcaataagactctggagtcaaaggctggggggtgggaggaagcctgatagttcatggaagctgagtagcaactagctgaccttaaatttttggccagagacacttcaagagatgtatttcttcccttgtcccagaaccaagagagctcaaactctagtccctgtcctttcctttctgtgcttcttctccatccaaattgctggcttctctatggctaaatccagtcagcaaataactagctctgttccctgatttaacatataattttattgggcagtctctggagtgtcagagtgctatcaaaatattccacaacaactttgtataattaaagcaggaatctaatttctggggggtatttcttggaacctaatagctgatattaagatgacttacatcagagccccacaggtggtagtgttcttgccagtgttgaactggttccttgctgaagataaagggctttgttttaacatggccatttctttacagtaattctttccatacttgctctttcaggctgttgatattaattactggatgaaaggatgggctcagtgagctttcagaaactatagcacagacagaccgcctcagtgctgccattcatggttgtcaatgttatcttagttctaaggttgagacttctgtggtttgaaagggaaatgtcacccaaagatttcaagtggttgaaatctgcttctcagttagtggcattactgggaaagttgtggaacctttaggaaatggagctttgtaggaggcagtaagttattttaggacaggttttgagttactatgtacttatcatctgtcatatatctatcatttatctatctatctatctctatctgtttacctacccatctcttcatctatctctgtcatcccatcttgctgtctcaccttttatcctgccacctgatccttagaatggcaatccttagaatgtactaatgtggtttctgttcctgttgtttttctgtcaaaacccataaatctcaccattttggatatcaaagttgtctttgataagttactatgtacttatcatctgtcatatatctatcatttatctatctatctatctctatctgtttacctacccatctcttcatctatctctgtcatcccatcttgctgtctcaccttttatcctgccacctgatccttagaatggcaatccttagaatgtactaatgtggtttctgttcctgttgtttttctgtcaaaacccataaatctcaccattttggatatcaaagttgtcttttattattgagattaaatttagttttctagtgggagctgtcatgttgagatacttgaaaacattttggaccttttgtggccatttctacaggcattttaggcagaagatggacagtgtttactcttggaatacatttcaaccactgaaatgagagcctcttgtgtactgacactctgtgttatatttttactttagtttttctcaaagaatgttctgtcctactctaccttttctggtgtggttgcttactctaaatgggtctcctctttctcatcctcaccagagttcaggagacaatagataatattcatatgattctcttctgactaatcaacaggagcaatcagattccacccttcaggcaactttcaaattataaaaacatttatttctaggtgtcaggatgtgtgtgtgagagagagacagagaaagagagagagagagagtgagagagagagagagagatgaagatcgctccagaaaaaaagggcctattgtgaaactttacatcattgtattcagtacattgttcagctatgtctgttcacaggatgtgttctcacctgcaaagaaacctgcaaacagtaacttcctgtgtgcctaggatgaagaaacatgggtagtcatttaagcaatgtctactacatgccactgtgggtatcaggccatatgaaaataagaaggaaagaggcaatatgaaaacaaaatgatttgtgtctttgaaatacacacatggcttcaggatgtatagaatgagcaatatgaaactattttaagttctttaaaaatcaatgattatcatggaaatatactaaaaattcatgttatagaaatatctgtagtaatttcagaagatgggtgaagtgggtggcaatttgaaagtttttattttaaaacctggtgcaacaaccgacattagttagcacctcctgatcttggaatgtaatagaaatggggtgccaaacctgattttaagataaaggtaataggattcttagcaaatataatatccaggatggattgagggacacttcttatgcctacaagtaaacctcaaatctttactcaagcaaagcctatatatacgcagaatgtgctgaatagacagtgttaaaacgtcaaactaagtgctaatggtgatggaaatcattatatcatatacatcttggaggcagagcaacaaaagaacagacaaaaagcaagtattggtgaaaaaagttgattttccataatagaaaggtttcctagagtgtttaaggatttctgtactaattcatatcattctgttgtaatgttgccatctatttaaaagggtcagactataaaatcatttaaacagcaaaaaggtagaactaaaaaatgcagttaaaatcctgtaagtgactaactagtcccaggagtatttaaaggaaagtggaaatgtcaggaccataaattagttctaagttctggggaagtctttgtaaatgccacaataactttttaacatgggtgaaaattcttgtaagttaccattaaatagcacactactgtcacagtccttaaacttaccatgcctaatgggatagaaagtagaggcatagtattattaattgaagtatgtcttccagtacagacatcatgaagacctcatgccttagtctatcaaagtgtgtgtatttgacatgaaactgattgttgtcacttcatgatacccaactccataatcatccctaaaaagcatatgctttgtatatatgatagcaattcttttattgaatctgcatcactatgcattattttacttatgacttgccatatttagagaaaaatgaagaagaatatttgggtgttagcaaattatctattgtgaatgaagtagaaggctagaggaacagctcagtagttaaaggaactcattactctacatggacctgtgttgggttcccaacaaaggcccgtaactcacaaaggcctgtgacacaagtttcctttttctagcctctaggtgcactatacccacatgtgaacatatgtatgtaagtgtatacataaataaataaaatataataaatcttaaataatgaacaagttagaactactcccacagtggaaatgaagggacattttaaggggaaagaagaataaaatgttcactgctttcagtaaggaaaggcacatgctaattgaaataattgagtctagtctgtccttcagaaacacgtcaaacaaaatgtctcttcatttgggagagaagcaaaggcaatggtgtgaactcaatttttaaaaagtgtccttttgtgactgggtaacctcactcaggatggtttcttctagttccatccatttgcctgtgaatttcaagattccattgttttttttctgctaagtagtactccattttataaatgtaccacaggaagtcatggcactgaagggatgagaactgagtctgacttgccttgatcccatcattggtactcactgaggtcgagacggtaattaaatccagagaagtaccaattacagtgagtttataatttttcaatggataatgagaaaaaaacaaactttgaaaactgactgcatgcaggaaagatcctggcaatagcgctcgtggattatcatagtagagaagaatcaaaccccactcagatgagaagcttgttccaagcagagatccctgggtaatagacacagcagaacagatttccagggtataacaaaataacaaacacacatgaagagagagattttcctagagacctcatttaaataagtttgtccttgagagttcatgacctcctggagaggtcagtctcaaggacaacattggtagctctagttgagaaaagatagaaggttaacacaaaacaaacaaacaaacaaacagaaactattttagcccaagtattagagacatgctgagatgagagcagatctgtagtttcttctccaatgaagatgagaaaattgtattaattgctataagaaaaatgttggtagttgaataagaactgtatttatgtaatgtcttttattatttagccacatgactttgttgtcttatgttcagtcttttagaaaatacttccaatgacaatttacgcaatgatattaatattttaagtcatattctaggactagcaataggggtcagtagataaaggtgcttgttgaccacagaatagatggaaagaagtgactccattgtcctctgtcacccatgtgcacatcgtggacaccacagtggtgaacacacatgagcacacactatcacaaaagaaatgagataaatgctaaattctgaaataccagtaagttaggtcagaaaatgaaattatctccaagacaaaattcctttttatcaaaaacttaagaatgattttaaagaacatgaatgaatactccattttcacaagtttcaccatagttctttctccattgcctgtgaaaactgacagtgtctaggaattccacaccggaaggaggttcagggcaacagtggactaatctgttccagggttcttcttgacagtcaacagtgttggaatgaattttagttattttaacttggcttaaatatattccaagctctaatgtgaggctgaaaatatttttttcatatttttttccataaggctggagatacacagttcactagtagagtatgtaaagatctggatatgaataccaactacagagttgggggtgagatgataattgttatacccagaatccagacacccaaagaccaccaagagaacagatccaatgcaaaacagtcttttaattgtgactatgtctctggtctaactgacacatctgtggagtaagatggacattgagtagcagtggggaagggtatttatattgggggtaaagcaagggaggatctaggggactacatattgcataggaacagactgagaattggtatacctgcgggggcactgggccatggttaattggttagttgacactgcagggaggttgctatctcttgggtggttgctgtggtaactacattctacttttatcggggaagaacattcagagcctattagcttagctcctaattggttcctgaccatataggggatatctctgagttttgttttagcaaggagtgcaaggacaaggaaactgtataaggtcaggggcgcaacacatcctgccacttcctgctaaggcaggggcctacaagctgctaggtcttttctgcagccctatgataacagggatctgggcaagggcctgtgctctttgggctcttcagtaataagtatgaatgttgctcacatttagatttgtttgtactggacccttaacctctgggtttactcttaatgtcacttatttctactagacagtgttactaattttaattttacctcatttgtggcatggcttttttttaaaaaaagcaatcttttctcattttgcataccaatcccagtcccctcttcctcccctccttctattccccccatgtactccttagagagggaaaggcttcccatggggagtcaacaaagtctgtcacatcactttgtgacaggatcaaggccctctcctgtatatctaggctgagcaaggtatccctcctaagaaaatgggctccaaaaagtcagttcaagcaataggaataaatcctggtcccactgccattggccccacagactgccaaagccacacaactgtcacccatattcagagggcctagtttgggcctatgcaggttctcctgctgtcaattaagtgtcagtgagctcccgccaactcaggtcaactgcttttgtgggtttccccaaactggtcttgacatctttgctcatattattgcccctccccctttgactggactctgggaactcagcccagttttcagctgtggatctctgcatctgcctccattaattgctagatgaaggttctatgatgatagaaccttaaggtagtcttcaatctgattacaagggaaggtcttaggtggagtcatccttgtggattcctgggcatctccctagagacaggttgtgacatgtaactttagtcaccagacaagactttgtaaattagttttatacttttctgataaactgaaagtgtctggtacatgtaaacttaggataagcatattggaaagtacaattgattgaaaaccaatagaaacatccacagttcatcattttcaaagttgttcaatgagacttgtcaacctgctcagaagtgaaaaaaaagtcaatgtgtgcagccatatctgtgctagcaggacaacagcagtgaaacttccctgtcgagcacatcactcagaaagtggatatgaggtgccctgcatggaacacaacatgacaagacaccaaaatttaagggcacagttttcaaaggtgaaaaatgggagttgaccattgagagtgaggatggaacactctgctttgactcccaactgttttcttgtctaaataaagaccaaatacaataaattgctttttttgccaaaagggaaaaaaagctttaagtttgggtatagtttgctttgaggtttgtctagggatctgcagtgactgaggtttataagaataaggtattagactcaagagaaaggagtgccttttaacaaattaatgatacatagtgttttacaattaattaattaccaaacaatttagcaattgctggctaaataaatggattccaaagaagacatctgagggttcttttgctgttgctacttaaaaatcattggcaggcacgaagttcttacagctggtctctgttttcttgccttcccttttgtgtcagtaagaggggcaataaaggctgggtagagtggtggcaagtggcacactctaatgttcgagttgaacattcctgaggcatatgagcattcaggctcttcctgaaaagcctatacctctctgaaaatctgtgctgactagagtctacatatttgtcccgaggctctcttcagttctctagtcttttgtccatttattaagctttccttcctgtccttctctggttgcattcactggctatgcctgaaccactccaggtgcttgcctattccaagaaagataattgggtgctgagcctcctggcgacccattctggaattgtttgcgtcagacctacatagccctgtttggcctgggactgacactgtatataccagtcaggtctggaactcaaagatctgcctgctgggggtggaattccgaccagccagacagcttagagagattctgactgtagagctgtctgcaagctgtgcagagatgcaaggatggatcaacatacatgtgttgatcaataaatgtaaagcacaagataaatatattaaagggcagaaaccatgtgatcacctttttcagtaaggtaaacatctctgacaaaatccaacttcccttcatgataaaattcctagagagtctaaccatgcaggagacacatctcaacataataaacgcaatggcattcagaataaggccatcctacaaataccatcataaaaaattctgcatcttactaatgagcagctgtattaatttaagagaggggaattgttgggagccaaatattgtgctattagaggatttcttggagtccaaagctccggatctccagtctatattgtatttgtagatgctaggtaatctgctattgaatagcatcatctcagaggagaatgcctcctagtttgcatctctacagaactaagcatttgaataggcctgcaccagtgcagagagcaaagtctacatggtgagtgagaacagatagttaggaggtattggtctacaggatgagagatggtagagatatctgctgatagggtctaggaggatgagagagaaatggccttgaagtcagggaagaatggttagattacagccaggaaaatgctgaatagagaagagactccagttttgcagcatagaactgagagcttgttagaccccccggaaaactcagctatctggggtcccaggccatgacctccgtcaccccaatcaccagacggattcaagagcttgctgcaaactgcatgaggctttattgtaatttaacgagctaaccccatgttagctcgggtctttgactcacccgccatggcggatggctagcaaagactctgagaagccacaggaccgagatcttatagggtagcgtaaggagagtgtctaggggtacgcacaggctcactattggtgtaccctcctggcttggagggcttgtcctgtgttgattggccaactggttgttatggtccataggccctcccagggtggttgctatgctctgggtcattgctgtgtgcttgtccataaagtacacccagggtcgtaaagcatagcgccaccagctaacttctgattggttccttgtcacgaggcaggcatctgactttctagtgtccaggacaaggtcaaaaagcacgtgttaggccactatgactgccaaaagggaagctggtccctccaagctctctaaagatgtcaagatgcctatgtctggtcttttttgctgttgggttgctaggaatttccacgtccatgctcccccactcaggcggaagctggtttggggctgagacatgcagggcctatatattctgtgaatacacttaataatttcaaaaatggaacgagatatccttagatgatattgttttcactttgattttaaagaatgaaagtttatatgtatgtgcttacttatcaatgtacttacgtatgtaaagatcagaggggaacctcaggtgtcatcctcaggaacaatgttcacttcctttgagagggctctctctgtgggttaaagctcaccagatggtactgtggtttcagtgggcaccgggaatcctcccactaccatctccccactgctgagattgcatgttagtgccaccatgtctagtgtttctatatggatactggaagttgaggtcaggtctacatacttgtgagacaagcactgtattaaatgatctattgttcatctctgatattatttttaattgtcggttgccttaaaataatatatttatatccataggagaatatgaaatacaaacagtactaggaaataaacattttagattttctgtatgagatgaacattagtaagatattaagatgtcttactaatatacctacagagtcagattcacaagaacatttcagattttgcttatcatattccttattgttatggatactgttgccaggaattaagaaaatgacatttaaatttatgctctggcaaactcttgattaagcaggaattcatgcatctgttttgaatgataagtggaaaaaattaaaaaattcttattttatctagaaatctgattcccaaattatattttgcaatcatatattaactcatcaaaaataatgttttagatgtctgtctgcttgtgacaagtgaaagcaataaaggacatggattttatgggtagggaggtggaaaggatcttggaaaagttgaaggaggggacatgtattttatgagtaaaaaattctccttttttaataaaaaagaagaagcatatgtagtattataggttaaaggttagttgttgacagtgcattgtagtaagaaatggagatagcagatgcagtaatcacaagaagactgctaaataattagagaaattcaagtactgaaatatttagcaggtgcttaaaattattacagacaataaaatttattatgctgtatacaatagtttcagattattccaattcctctatggcatatattcaggacacacaagagctttataacccccattgtttatttaatatgttaatttgaagctagacaaaatggcaatgtgctaagtttgtgtacaaaaaaatactattaacaaactagatctgaaagtagagttaatgagaaagtttatgctagatggtgtgtgtgtttaggtgtgtgtgtgtgtgcaagagagagagggagagaaggagagagagagagagagagagagagagagagagaatgtgtactcttgctggactgctggactcatagaggctagaaaagtaatagaatctcttggagctgaagttatagatagttgtgaactggctgccctcaatgctgagaatacaactcgcattctgggaatgcagcattgttcttaactactgagctgtctctccatcctcaagtacattcatctagcaaattgtcaatcatacacaaccactatagacagagataacaaaaggtaaacctcagaaaatacacagcagattcttggttgcttaatagcttgtccatttgaatatttagtatttcagtgttgtaagcctatgaggttaataatcacacccttgaaaacaatttatcctgcttcattcccagttcaacagtggaaagcgaacaagagaacagactacatgactggaaaagtgaattggtggaaagagaaggcagacagtactctatccaggcacacaatacttatgcctcacaaacctatttaatttccttcatgtgaagatgactgcagtgttgtttcataatcatttaaaattccttgaaacacagtggctaggggtgataagcaaatccctgcctttgtcttgaaaggtggctcttttgaatgtaagttttcctgttgtcgttttgctgattctaaagttttgccatctctcaattccttaaaaagaaatgataatctcctgtgggaagactcaggtgttcactctcacctgggaaagtccctggttctttgaagttaccattcaaagcaaaaggaaactcaggcaagaagggctgagtttaattgcttcgaaagtctgctgcttttgaatgaattacgtagctggatttgaaatgtattggcatgcagcttctcagggcttaatctccaactaacaggactctatgtctgctttgcatttagcaggtccctctgctcagatgaaaacacatggaaacacagtcatctcagccatctcagcgaagaatatccccagtgcctaggcatggagggaagcgagttaacaccctctgaagtcatttaactcattgtgctatgtgcttgtctgctcagaatgttgttcccagtcactttttactccattcattataagaaaagattttttttatgtccctatgttcacatactcacacataacatgataaggtttctttgtgaacacgagaaggggaaaagtgctatagagatatttgatgcactgttgggaacattccacaaccatgtagaggccccactcactgtctagccatgcagccccaagtcatgcaggaaaaaaaatgtgtttctaaagatttgtgaagcaaatgatgtgaggaaccgctaagaagttgtaaggactcagaatgatgatgtcactgtttgacaaacagcatcaggagaccctgtcagggagctagaaccacagcaaaggacttgaatgagtatggaggaaagaggcagtgtcactgatgtttccttgggggagccttccattcagatgggggctgtgagggtcatctcgcttccaaagcttgaatgcttcagaggaagaataaatgtcatgcttgctcagctctagctatctcctgatttgaatattacaaacaacactgaaatctctgtggaatttctccatgtatctgcatgccagatatttcatgcagtgtaaattaaatcaagaaaatactcagacattccactttttaaacatcaaatgtgagtagctttgagagagctgctgcatctctgctcacatcctatactagtcagtgttttacacactgcaggttaaatagaacctccatcttagtggttgcctaaattttcttcaaatatgatttatatgctaggaagctttgcaaactcagagctcttctttttaatatcataacccaacaagacactttctttgtgttccccactaatcactgactggctgtatatagaacttagcaaattacttctaaattatgccagctggttaacttacactttcaaaactagagaccaaagattggaacttcaaagtagatacaatagagggccagtgctgcatctgaggtagtaataattggaagctaggaagaactttaaacttttaaattattgggactgccaaggaggaaagcagcaaagtaaaagaaatggaagcagaggaacgagacgggaagggtaatagagagggaacaggatgacaggatgcatattagctacttttctattgctaatagaatgccacaaccaaggcaacttgtagaaggaagggtttgtttgggcgtagacttccagggataggagtccacgaaggagttaatgtttccagcaaccagcagacatagtggcaacgccagctgagcattaacatctggaactcaagcaggaagcacagagagtgaactggggacagtgattagctttttaaatctcaaatcccagccagagtgacatacttcttccagttaggccatacttctaaaacttacctaagcaactctaccaactgagaatcaagcattcaaatgctagagcctatggggggcattctcatccaaaccctaactaacagaaggagaagagaagagtagaaacagtatatccagtgatatcccctgaaacattatttgtgatattaacaataaatacaccccaaatatctagaaacagtgcaacaatataagatagagtagcatatactgtgtttataatcaagaaatgaagagtttcatctatacaataattttgtatgatctttctattttattatgtataaaattatatgcagagagtattgaggccactttttattatttgacatgtgttaatatatgctataattacatacatatgcatgtaaagatgtatcttcatatactacatacatgtaaacatccataaatatagatagagttatttacatatgcagataagcagatgagtttaaatccagatgtaaagtaatgtctaatatgtgcaaaaatcaacatggaaactttaaagtagtcaataaattcaaagtaatgtagaaaaaaatagtgtataggagacaaagaacacccaggatataaataaagaacatataatagattcaaactttaccatattcatagtttaaacactacaattaaaggccagaattacaatgaattatgtaaatctatactacatggaagaaatatattgtgcaaaaaaagcaaatataggtcaatagaaaatgactcagtcttctgctcttccctacgcatccatatgcagtaaatcccttggagcaaggagagccatattcctcagaagtgtagtcactgataggatgttcctgttcattagtaaataaaccctcctgcttactaatgacagcaaacctacttaagagcaacaggctacaaaggaggtgtgaaatgggactgggaactgggaacaggaagatgttctgtggtggttggaaaagaaatgatactgtggaagaatatgatccaatatatactgaacagacagatagacagatgatggatgacagagatagatacaggtagatagaatgaatgatgatagatagatgatagataaataaatgatagatatatagagagatgatacatagatagatagatagatagatagatagatagatgatagatagatagatagggatagattgatagatagatgatagatagacagacagatagatagggatagattgatagatagatgatagatggacagacagatagatagatagggatagattgatagacatatgacatgtatggatagatatataatggatgacagagatagatggatagaagatagatagatagatagatagatagatagatagatagatagatgacaggaatgtatagattggtagatagatagatgatagatagatacacatctgtaatgaacttttgaaagagtgaaaagggaattgcacagggcatgatatatatagccaatagaatccatattttctaatataaatattagaaaatgacataaggcagaaaagcataatatagcatttaattattactcaatatgtaaaacaagagcctaagagaggagcagaaacatcttagaagccgggcgttagtggcgctcgcctttaatcccagcactcgtgaggcagaggcaggaagatctctgtgagtttgaggccagcctggtctccagacagagtgccaggataggcctccaaagctacacagagaaaccctgtctcgaaaaaccaaaaaaataaaacatcttagatattagggaactaacaaacagctgcaacatatgtgaaacagacattgattgaactgaatatagttctatgaatatgtgatgtcaatttctgcatcagtgatctacatgagtaatatgcaggtcagtcatgcgggcaggacttaatcaacaccagccagttgatgtgattgacatttatggagaaggggactggacaataggaaaatgtgtacttttgtcaggaacatagagtacatttacagattaaactctgacttatgaaaaaactgaataaaatttgacaccttaaactcctagtgcattctcagagcagaaagtaactaaattagaaataataatagcaaaaataatagcaggaaactagagaaaatactgtaaacattttagaaattaaacaatatatatcaaagtactccattcttcaagaaagaaacaaaaagaaaataaaactcaaactgactataaatgaaaccagaaacataagaatccaaatatggattgtatcagctgcaggtttaacacaaagagaagaaaaatccacttgtataaaattaactatgaataaatttaaatttgcatactcatgagatattattgggaaaatgaatgagcatttttcatttgaaccgatttaattttattatttttatgtaatgtgtgtatcatggaggaatgtaggtgtgcatgaatttacacaagtgattgtggtgtgtgcatgtcatagttcactcacatgaatcataggagaactgattagaagctggttttcatactccaccatttctttgatttttttctctttattggtcaccactacatagaccaacctagttgaaccttgagcctttgggaatcacctgcctccacctcccctctccctgtatgaacactgggattacagatgtgctgtgcctggctttccatggatcgtgggaatttaaactcagctctttgtgtttataaaccagatacttttacccctgaacagtctcttcaaccttctcaaatattgtttataattcattgcttgtagtttacatgctgtacaaatgctctctggtgcaatggtttggtctataagagtttactgtgttaggactgaagattttttgtcattgattctcatattttgtttcttggtttaatttttgaacatttatccatactggcacagtttgcacccccctaatcaaaatatggttaagtctgaattctctaaatctgaaactctcttgagtaccactatgatcccacagttgaaaaattctgtattttatcccatgtgactggtcttggtaaaaagcagaagaacaaaaattactttatgaacttacctcagtctaggttcataatgtatatatgtgaagtaacaatggatttcaggtgtaagccctgctcattcacagaagatctccatatgcatagtaaaatattcaagaatataaaaagcttctagtcccaagtaagataaggaccttcaatccacagtctttaaaaaaaggcagctatgactaacatgtttcaaaacagtatgaaatttaaaaatgctaaatcatttagcattctaaatctatgtaaatttcattggaggtccttttttaaagaatgtatttttaggtttgagcttgtttttactttaatagtctatcttagttgaatgaacttaaaattgataatactttgttacctggtacaatgggtatggttgcctgtgctgtatgtacaaatgtatgcagtacatgatttctaagcatctctaaatggtaaaatagcagttgcagcttttttctgcatgtaggtaggctgagggagtgttgcaacattcaccagctgcatcgatttcattacttgtatgtttttaccttatagcttatccttcctttagtggtacaatgaggcccaggcttagcatatacttaaggcagtttacttttcaactggctttctatgttctttcaaaatttattacttatcagaagtaattaatgactcttttattcatattcagggctagaatgttctctcccattgacttaaattattattccactcagctacaaatattttcacaggtggctttgtgtgaatagctggagtcttgtaatgctacaaccaaatattttacctatactatattttgttctcccaatcattagtaatatatctagtacatcttatttattataaagtaattgagttttaaaataaaatatgtaagccaagtatcttataagacatgagttatttaatcattacctcaatggaaaataagcactatcctcttatgaaaatatttggtcttttcccagttcatgttaagagagtcacagaaatcatgtattctttgctcctccatatttagatatggacacaaaccaacacacactattaccttgaggaaatatcgtgggtcagaagtagaaagagccactaaagtcatctgattatcttctgggttttgagacaggatttgtgtaaccctagatgtctgtcctaaaactcatggagatccacttacctctgcttcttgaatgctgggattaaaggtatgcaccaccaccaatgcccgactcttacattctgaattgcagagctctaggagtcaggaatctagagaaagactttgattatccagtgttctctggtcataagctgagccttataaggttttactaatgttatgtaaacaaaagtgaaatgcacactctttggaagaggtaattcaaatactaatcattcttgcacatgatctccaggctttggcttcctgctgtcactgaaggcaactataacagatgctaactggtctacctgacacagtgggcttggtagaagcagtataggtgtcagaatatgctcttagtgtagcatcccccttttctgtgaaatagcttcttagattttcacacacacacactacaaaataaacatgtatgtagtctgattgttgcataccttttcggttatttggtccatcagttaatggtattatttattttttatttttatttttctccatttctttatttaaattagaaaaagattgttttacatatcaatgcctttccctttccctctcctcctcccctgcccccactaacatccaatctatcccataccatttctgctccccagggacagactctaaagagcccccctttcatgggggctctttagagtctgtcatatcctttgggatagggcctaggccctctctcatgtgtctaggctgatatggagtatccctctatgtgaaatgggatcccaaagtccattcctatgatagggataagtattgatctactacaagaggcctcatagatttccgaggcctcctcactgacacccatattcatggggtctggatccgttacatgttgttttcccagtgatcagtctgggggccaagacctccccattgttcaggtcagctgtttctgtgggtttcaccagcctggtctggacccctttacacttcacacatcccctgcatctggattccagttcagttcagtgtttagctgtgggagaatgagaaggggagaagcggaggggtgaggaggacataaagtagcaggaaggttgtgtatggggactaatagagtagagcaaaaaaaaagagagataccataatagagggagccattataggtttaaagagaaatcaggcactagggaaatgtccagagatctacaaggatgccaccaactgacaatctaagcaacagtgcagaggctaccttaaacgccctcccctgataatgatattgatggctgacttatatgccatcctagagccttcatccagcagttgatagaagtagaagcagacacccacagttaacggtaattcatgcaaatactctccttattgaaccagtctgtgtttctcgctattgttttagcaaacacaaaagacctctgttatcataaggaatataaatggatgtctgaaggaagcaaaggaagaatagtctatcactcctatgaaaagtgtcagacaattcgctataaccaaacaaatatgaggaggacaagacaagagcagtttatagtttcctaaggacatttgcctatgagagtggggatttaaccaagtgagcaacaaagtaccccaagcattgcctgaggctcccaaggtctttgggattgccaggaaaatgctctcagagctaggagagagacacatgaacgaccacatgctgatttacattaaatgcttcagatgagagagctttatttcacttttaatctagccacagatgtaaacactccattaattgttgtcagcattttctgattccagtgcacattgctgcagcatcattcagaagactttctcgggcacagagaattggctgtgacacatttcctgtcactatggtgcttatacaagtagctagctgtacagggtatggaaacacattttctgctttgttttaccacctggaaagtttcaattgttgcttgtgttaagcagggcaaaatgcagcacagcactccatttagaggaaagacaataggaatttcttagtgcatccacaagagtagggtaaataagcacaaatggtgtgttagtaaagtggcaaaatgagttagaaaatgtgactaaaggtagagaattaattataattatacaaatactcattaattaataataaaacacattcacctttaacccacaactaaccaaattttgtccctcttcaatgttgatttataccagatagttatatgaaaatcagctgccatttgatacaataaaaccaatttaatttatataaaatatcactttactcttcaaaatagattcttaaaagatagatatatgacctgattagagttataaataccatctccagctcttgacactaattgggctttatttaaatatacctaatcaaatttaatagaaaaatatctataaatataattaaaattgacaatacatgaatacttttgttataaaatatattattgtagaaaatttcaagagtgaccaagagtagaaaggtataaaaatgaaatatcttttactcaaggcccaggttccattgtagtcaccaattatatttcgttgttgatccatattggaaaatatttctccattctgttctttctcgtaatatcaatatactaaaattttcatatctataattcaataactgatatttaaattcttcttccttttgactattagtaatcattaatgtagacatacttatggacatgcatattttggatatgtgagtagaattgctctatctgtgggaatgcctctgagaaccaaccagattctttccagagttatcacaacacttcacatgtgtgaagcagtgccttacttaccctgcttctctgtacatcacattgttcatctgacagtttacaatcatagtgatcgagaggaggcaggcttttttttgttttgtttttcgaggcagagtttctctgtgtatttgaaggctctcctggaactagctcttgtagaccaggctggtctccaactcacagagatccacctgcctctgcctcccaagtgctgggactaaaggtgtgtgccaccaccgcctagctgaagagttggcttcacatggtgacttacacctgtgttttgtagtcactcctaatgttcaatgttaggtggtctgtctcagagacagttaaacatcagtgaatagaaggctggccacataaggacagtaaatgttacactaatgattttgatggaaatagcaagtgaatatcttgtagaaaatgtggccaagacataaaaatgtaattacttatacacagggcccaggttcaactgagaatcacactgatcacatttcatttatgcttttcaggcaaagcatttggagaaagctgtgatgtttatttccccctgccatcttcataacacaagcaagctggccagcagccttgctgtctgacatcttcacctctcacacaggctttatgactctgaggaaagcatgcacaacgctgtgtctgccttcctacttgctccttgaccttaaactgaagatggccaggattgtgcctacccatgaagtgtttttatttacaaatatgtagaagctggccgaatgaagtaaataacagctatgttcctcttatccatgctagcaaatgaatttccccttcttaagttcttggacacacttacactggtgatgagaaattttaataaggggcttgtatatggataaactgtttgctattgaaagtatgaggtataaacaaagtccaaccactttacatcaagacagctgctgaaagtgctcgaaggcatgtcagaaatcttcaaagctgcaacttccacaacttgtccagaggtttgcaggaacaacactcaacaaaccagggccatacttcatgggctcacacactacgaagcctgatgcctgagaaatcatttcatttcttttaactgtggaaacatcctgcgtatactctagtgttctagcagtcacaggcacagctcatgctggagccctaacttgatgtccatgtggcactgtgcaatagagttgggaggtcaaggggactttcactttgacttcaaagtgaaaccagagaaaacaaacagacatcagtcacatgatggagcccttgcagagaatgtcaccttgtgaagctgagagtagagttacagtgggcagcagcatggcatctcagccttcaaaagccacaaacctcagcattctgcactggagaggagctatgtgagggccgaacaacaaagatacagggtcaaggttgcctctggtgtccagcacggactttttttctgaagtaaaacaattctaaactaagagtttagggtgtcatgtctgccctgctgagttttgattttctttggggaaatcatttctttatacatttccctttcttccttttagaataagaatattctcaccatatcaataattgctgtagaatcttagaaatgtgtatatttttctgttaattaacagtgtctcacaactggaagcaatcgtccttgagttttgagggaaggtcggtcatcttatacttttgagcaatgctggaaatagttaaaacttggagactggtgggaatggaataaacagtgctaggagcagacatgttatttttgtatgaattcacctcttggctgactctttcatcattacatattcctttctttatcttcactcactttaaacatttttaatttttatttacttgagatagggtttcagtttatagatccagctgtcctcaaagttttggttgtattcctatttcatccttctagtgatgagattagaaacctgtgccatgacatctagcttcagtacttacagtgaaattgaatgacatcttttgcatatatgtgaaccctgcaaggttctatttcttttttttttattagttctagttagggaacaagcttatttcaagtcggccctcaaccggggttctgcaaagtccaccaaatcttcctgtgctaatcctgggcccttccaggattagaagtgtccagggccagagtgtgacccttcacatgggatgggctctcaaagtcccttcttgcaccagggaaaaatactaatccaccaccagaagctccctggagtgcagaggcctccttattgacatccatgttcaggggtctggatcagtcttgtactagcctccctgacagcatctggggtccatgtgttctcccttgtttaggtcaactgttcctgtggatttctccaacctggtacagactccattcttcattcctccctctcttcaactaaattcccgatttcaactcagtgtaaatctgtggatgtctgtctctacttccttcagcccctgggtgagggctctaggatggcataaagagaagtcatcaatctcattttaggggaagggcttttgggttatcctctccaccattgcttggattgtcagattgtgtcatccttgtaggtctctggagatctccctggttccagatctcttcttggacctatagtggctcctccatatttagatatggacacaaaccaacacacactattaccttgaggaaatatcgtgggtcagaagtagaaagagccactaaagtcatctgattatcttctgggttttgagacaggatttgtgtaaccctagatgtctgtccccccaattagttcgggagttcaccctgcaaggttttcaatactatataaaccactattcttttcattaatcagttttaatgttctgggtatttgtaaagtatgaatgtagtttccatgattcatgaatggtcaatatgagtagactgctaaatgctttccaaagttgtcactccagtgttccccaccagaaagttgtaacagtgcgtgttagctcctactgtgactttgacaggatttttctgtgtagctttggagcctatcctggcactcgctttggagaccaggctggccttgaactcatagagatctgcctgcctctgcctccccagtgctgggattaaaggcgtgtgccatcaacacccggctgactttgacatatttatcgttatttgccattacctaggacacaaatttcactttgttttgttctgaagaaatatgtcatcctaaagtttctttgtcacaatactctatgctctttgatgactaactgagatcacccatttcaatttcatgctccataaaaggactgggctttagagataatcttatccctatcaagctgaaaatactctacataatgatggtacaataattacacagctatgtttatcacatgatttatacatttatgatttatctcctaaaatatgactctgttgttctgttctgccacaattcaaaggcaatacctagcttatttctagcaataacatttgggaaagatatgctaagttcatgaaagctgtgttttcaaaagaaaaatttggaatcaagccaagagtatattaatggattaataaataaataagttatgaaaaatatgtacaaatgaattatattcagcatcaagaagaaaggaggctttcactcttaccatggcttgagtaaatcataaatactccatgctacatggtgggagccaatgtcaaagacggtggttccttgtaaaagtcaaattcatggaaatacaaagcaaatagtagtttcctgggcttgagacagagaaaaacaggatattgtgcttggtgagactagagttcagctttccaagaggataaagtatggagctttgctccacaccatggtaaatatccataacactacggactgttagaaacagttaaggtttaatatgtttaccaaattaaggcttttaaatgccaggtaaatatactcagtaggggatagtgaataggtcaagatacaaggtgattttgggaggagagaaaataagagagaatatttatgtggggaaattctgagttgtatggattacctgtgtgttacaggcaaactaagaaagaatagattttggcctcaaaatgctttagtacaacaagataacaatttcttagtggattttggtgtggttctataaagagctttaaagttattcatcacaatcattgatagacaagactgctattgacttttgaatataaaacatttaggccatgatctttaatctaaacagtgttcccttgttggatgagatatattctataacatacaaactttactcctcatctttcctaggaatctggtctaattagaagcttgaattgtcaatattaacagccaaagatgaaagtgtattttttataaaataaaattctgttttgttgcaataaattaaattttctttacactctattcttggcattggggtggaaagataacggctgtgatcaataaatacaacatgatggtttccaaagccagaaagtgtggttattagtttaaaatcaatgtgaatacccttgatatcactgaagagggctgtacacagaccactgagatggtaatgtgtgttttctgaatttttgatgattaaaatattacaaatgccagttctaaaaaaatggttgattagtgggaagcatttgttccagcaatgacttcaaaaacctttagcttatttttggttttaggattacttccattatagtcagtatttccttgcttcctaacatgtcattctactctattctcttaggacaaggttctattctgaaatctgtgctgtgtagtccaatctgccagtccctcaacttcttgcagagtactaagaaagaagacaaacatgtagacttctaaacactttgggggttgtggtcagtcagacacctctttgtcatcaaaagcagcaaaggtgaagtccttctgtgtgtgagttctagtcgataggcacaaccacctttgtatatttggttgtattcttttagcaaactgaagctgaaaaataaagtaagcaataatcaacctgcttgaagtgaaaaatgattattgctactttttactgtgaaatacataaggagaattttgaatagccaagaaatcttgaaggtatttgttgatatcaggcacacaatgtccaccataaagctgcaaatcacacctctccaagagcatccattgcagctgctgcagatatttctaacagtccacagaattttctccaatcttccttcatcactgtcacccccaatcctgaacaaaggaagactcattttcatttctgtgccactatactaccaactacataataagctgggaattgctatgccagttgaattgtcaaatttgtcttctcctaaatgatatttttggaattcctaaggtccccttactcaggattttgtagcttaggccacagtaaagatttctataaagtgttagattgcatgaaggcaaaatctgtattgattctgatcattagtcatcatgaggcaatatctccaaataattggtgatttagtctgatagaatgctataaacgggtaaattcctggaatggtttactaagagaaaatccaagatattctcccaaaattcatcagctcccatagacaatggtgttccaatttttctgaagactaaatcaagggaacaaagccaatctacttgcctagaaaacaaaattcaaatagggagtttttaggttcatattagctttcaacagctcaacatcaaagggatgaaaaatactctttattttgagaaaagaaattataataacagaatatgaaaaacacaagaggtgggaaaatccagcaggttatggtttatagactaataggttatatggaaagtgtgtacaagctcagtaaatttcattcaaggaggctgtgaaaactcaccagatgcaacttcaaaataaagcaatcctatacccaactttagaagacaatcataagatattcaaaaggaagaatattgtgtataatttatgtttacatttgagattgtaatgatataattaatacacagaagacaaacaaaattcacaaaattgtaatttagccttcactcacaaggagaactctgtcactctgcttgggaatagagtcagttttattattataaccttagtattctatcactcacattcatctacatatttatctatgtcagatctaattagatttcccaagtggcttcacactcagattatctagttatgaagtgaaggttgtttatcaagattggctgtgcatatacatatccaaccacctatagctattatccatcttccatctatcatgtaaatattaatcatggaaatagagataggtatacttggcctgagaaagatgaacaatgacttgagtcaggaaagaggacagtactagggaagaaactatgagtgaagaacagtggtaaatgtgtacaaaagtcataaaagaacccattattttgtactccagcaaaataacttaagatttgctccagaatgatctgttaaatagtgtgtactccaattgtaaacaattacagtacttacattgcccaatccagtaagcaaaaatccctgaatgaagctcccaacatttcctgtttcatttttctaattactacaattatcttaaagtatttttaggtgcactgtatgttcataggtcctggacacttgttattccaggttgctgatgccttgcataaagtttctatgtggtttgtaagcgaattatttattatgctacatacattatttcctattacatatctattttatatgaattgagatacctcttcttggaggaaggtgggtgtctcatatgactttagaagtcactaaaatgtatgtcttagaaaagaaacacaacattcagggttcagaaaacccctggaacttaccagatggctttatgataagtgcattattgtggagaaaatgttctctagcaatcttagttttctgcaagttgtataaggagcctcaagagtcaggttttgtgagtcttcactcatgttaggatggacttctcagtatcacaactgtcgttgactcaaccaagctcctctaaacaatgccaatagacttgcaggttcacctctctcaacttgggtgaaggtggtttttggtggtggttttttttaattttctttcttctgtccttcctttcttcctttccattctttctttctgtcttcctcctttctttcatcgtgtgtgtgtgtgtgtgtgtgtgtgtgtgtgtgtgtgtgttgcagttctatgtatagatatttcttatgccccctcacagggaaatcatgcaatgaagctaattacagagtgtattattgcttcctgcagcttagatatgggtaaaaacgttgactcatacagtaaaaatatttgtacaaatcctttatcttaagtgcttcctctacaaagaaaaaatattttaatttaaacatgttttcaaaatacctttaaaaataacaagtcaacctggctcacagatgataatgcctctataatgccctgccctagctccaacactaagctaatactacaggtaaagccatgcattgaagtatgggtctcctctactcccttatcttctgtgtctcctgtaattacaaagtctattcctctagaaccactctgtgaaaatgtcttcaagagtttttccttgtagatacagaccttagaccttagcgtacttttatttaagcaataaaatttctaaggcattgactttggaaatacttattaaagtatgcaaaatttaactaaatatggttattatcctatgcaatttataattactttaccagacaactaaggaagcatcttttactgtgaataatcatgttcttgcaaggtaaataattttagtaagcacctcatcaaaataatagttatcagggaataattgccatggttcaaatgggtcacagtttccacttaatataatgggacatgggatttcttttgccagtacttaatcttccagataaaaggatttaaaaacagacttggaaggaaaatcaaggacaattttagggtagactaaagggaaaacaatagggtaggcactctggagatgttggcagctgagaggaggaggggctcggtagagaaaaggaaaaggatattctttctgagttagaggtgaaaaagcaggtaagctgcagagttcagcatcaccatccatgtgagaaatgcaggtaaaaactacattgagaagaacttagcaagaaactcgtacagatgttggcagggatgcagaaaaacaagcagctttggcaaaaattttaaagtagtccagccactatggcaatcagtgtgaggattcctcaataagaaaaactagatctaacccatgatgcagtcacaccaacctcagatgttgaccatgcagtccctaagtcaacctgtacagggatacatgcatgccagtgtctatcacatgtcttcttataatagctaagtgacagaaccagcataagtgtccatgaacagagcatgggacaaaggggatttgttttatacacactggaattttcatccataaagaagaataaaattatgtcattttctgggaaatggatacaagtggagataatcatattaaattaattaagtcggtctcagaaagacattgcgctgtgttgcagcccatttggggatcatgaattttatcgagatgcataaatcacagatgtttagctgatctgaaggtggaagcaaactatctggggaaacagagagaactaatgaggatttaagaaaaaaggagtgcaacagactgtgtgggaactgtgcacaaagtgtgttatatacttacataaaaatgacattgtggaatccaatataattaaagcaaacaagtagcaaatcaagaagcctcagcaatagaaatttgtgaggaacttctatcttttatttcaaggaggttcagaaagcaccagagtgcttggagaatcagcacaaccaggttcaaggtattgtctggtgtctgtaaacagagatataagagacaaaacaaaaaagttaatttctgggatagaactcactgagtctttgaggtcctgcttcaaaaagctcccctggggaggtgggacagaaggtcaaattctctcagaaatcagaagtaggcagcttagcactgcaggcctgtgcttgctagtttatataatcttgacacaagtgagtgttattatggaagaaggaacctcaattcagaaagtgccccgccagattttctcatggcaagtctgtggtgcaagttcttgattaatgattgataaaggagtgcccaggtctctgtgggcaatgccacccctgggctggtagctctgagtgctctaaggaatcagtctgaacaagccaaaaggtaaacagcattattccatggattctatcaccagatatctacatcaaaggaggttatcaaccactggccaaaccatttgtaatgggaattaatggccatcaatcatgaggtttatgtcacaggatgtcaccatactgaaactcatatgactcaaaaggaggcatctgctgtctctgtcaggagggttgttactgacactgacatttatgcctgaggaatatggcatatatgtgtgtgtttcccagatggagcccaggaagccagtggcttcagatggtccctttcattgtctttctccttgcttagtctttccattggccctgaaatctgtggtgattaaatcttgctttccagagcagtactataaggaggtagacagaacttgaaggagtaaacatctttggtaatttcataggtctctggggatttgtcttgttaactggactgttggactcaagtgctcccagtctgacttctcgtttgactgatgtaagaccttccatagtcatgtctccttttgccacacattgtcattattacagccatgctcagcagagtccaaagagccttggatgatttttgaattgggatttctgaattgttatctaagcaaacgtttgtttttatgaagttagaggcctcaggtatgttttcttcatattgtaaagtgaccatgaatacatgtatatcatcatataaagagctgcagagaataagtgaccatgtggatgtcaagccccaatcactataaataccatataagcctacatttaagtctcaataggacatcatggaagggagatgggtgggtgagtagagggatgataagaaagagaaccagaacatcttctgtaaggtattatcttctagatatgacaggaatgctgaacccatgatatctcaccagtagtgttacccacgtatgacacaaataatgatcacagcagtccacaagcgaacttgaattgaagaaattccacaagggtcttcccctaaaagaagtgtacctggatatcagttgtctggagagaaggcacttcagtgaggaggtcacttttctgcaggttcatactccagagtcattaactgacactaaagtggtcaaccagcatgatataggcatgtgtaaaaataataattaagaaaaagaacttgtagggtggtggcagcacatgcctttaattccagcacttggaatgcagaggcaggcagattcctgtgtttgaagccagcctggtctccacagtgagttccaggacagccaggactacacagagaaaccatgtccccaaaaataaagcacaaacaaaagaataggagaacttcatgacatgggttcagtctctgaaattcttctaagggtggaaggacagaaccatcctcacaaatttgtcctcagtacttcaaatatgcatgtatgcatgcacatgagctgatacacaagcacacatgcacagatgcaaataataatgatgacaaaaattgaaaactaaaaaaatgttacattttaaaagtggtttcaattgacaacaataagagtccttttccattctctaagtaatattatatggcatccttagtcaatacagaccagttaattatgctatgtattagatttaataaaagagttacaattttcttgttccctagctgctctggagctgtggattgtcattatcatttgctttacttctaatatccatttatgagggagtacatacaatggttggcctactctgtctgggctacttcactcaggttggtttttctagttccatccatttgcctgcaaattccatgaggtcatcaatttttacagctgagtagtactccgctgcataaatgtaacacattttccttatcctttctttagttgaggggcatctaggttgtttacacattatggctattacgaataatgctatgagcattgttgagcaagtgtccttgtgatatgatgtgcccaggagtggtggtatcactgagtcttgaggtagattgattcccaattttcttagaaacttatttccaaagtggaaataagtacaagtttgcacttccaccagtagtggaggtgtgttcccctgatgccacatcttctccaacataagttgaggacaacataagttgtcctcagtatttgtgattttatcctttttggcccatgtaagatggtatctcagagttgttttggtttgaatttccctgatgattaaagatatgagcagtttcttacatgtcttttgacaatttgagattcttcttgtgagaattctctgtatagctctatacaccatttttcaattgggttattttgtattataatgtctagtttattgagttctttataaattttggagataagtcctctgttagatgtgaggttggtgaagatcttttcccattctgtaggttgctgttttgtcttattggctgtctcctttgccttacagaagcttttcagtttcaggaggtcccatttattgattgttgttttcaatgtctgtgctactagtgttatatttaagaagtggtctcctggaccaatgcaatcaaggatacttccacctttctcttctatcaggtttaatgtagctggatttattttaaggtctttgatccacgtggatttgagtcttgtgcatggcgatagatatagatctatttgaaatccgctacatgtcagcattcagttatgccagcgccatttgttaaagatgttttttcttgttttcattgtgccatttttgcttctttgtgaaaaatcaggtgttcataggtgtgtggattaatgtccaggtcttaaattctattccattgatccacctgtttttatgccaatgccaagctgtttttattgctatacttctaaagtattttgaagtcagagatggagatgccttcagaagttcccttattgtatagaattgttttagctattctgggtttttgtttttccatataaagttgaatattgttctttcaaggtctatgaagaattgtgttgcgatttttatggggattgcattgaatttgtagattgcttttggtaggattgccatttttattatgttgatcataactgtctaagagcatgggagatctttatcttcttcaatttctttctttagggactaaaagctcttgtcatacaggtcttccacttttttgcttcaagttaacccaagacatttaatatttgtggctattgtaaagggtggtatttctctgatttctttcttagtctatatatcatttgtgcaaaggacggctactgaattttttaatcacattactgaaggtgattataagttggaggagttctcaggtagaatttgtggtcatttttatatactgtcaaggaggaccctagcaaggacacatggatggccttgggaaggaaaattagatgagatctacagggtaaactagggagaaaggggtggtaagggaaagggaagggacataaaaacatgagggaatgggatggtcagtgggggaagagattcagtgcaagagcaatgaaagagatatattaatagagagacactatacagggttacagaaaacccctgatgccacagcaattcccaagaatctacagattgaccccaggtaagactcttagcaatagtagtgagggtgcctgaactagccttcccctgtaatcagattggtaaatactctggctaacgtcatagtgccttcatccagcaatagatacaagcagacacagacatccacaataaagaagcaggcctagttcaggaaatccagtggaagataaggaggaggaaatatatgagcaagggtggtcaagattattattgagaaatctacagagacagttcaaacaagctcattgaaactcataaattctagactgacaacagtggagactccagggcaccaaactaggccctccacatgtgggagacagttgtgaatcttggactatcagaggggggccctggaagtaggaccatgatacaaaccagctatatgagctagcatgttgaagcccattccctatggtgggatgccatgctcagccttaatgcatgggagagctgcttgtccctgtcccaacctattgtatcagactttgttgactcctcatgagattccttaatcatgaggaggaatggaatggggttgggctggggaaaggagggagtgagaggaggggtgggagggagaactgtagttgcaatgtaaaaagaaattagaaaataagtcaattataaaaaggagctacaattctcaactgtaatatgattttcttcttttgatacttcatcctgctatggaacagagactcctttctcctgcaaggagctgcaacatgaacatagtcaaatgcatcacgatgaggctaatgttctaaggcaaagcagagattttttaacctagcctacccccagagccttttaatccaattctattctgcctcgacgatagaacctcattggaagacgaaaatgatcattgcagagtaaaataacatatttaatttcatatactgaatgtgtgccctccatcttcaagtggactaggtaaaattaagttcgatattttcattttttttcaagtagagtatggcagaaaactcaatacaatcaatgattactataaaaataagctgtctaacatgaacaaatgtatcatgcactgatcagagctaacatcaatatgacagttatgtatttaatatgattctccaacaggaagtcataaattcagaaggattgacttgtgtgttttttgaattgcagttatatatgtatagttattttatttatctcagttactcataggcatatttctgtggccttgctttcacaagtgtgataacgacatgtcaccttagattcatgccacaggaaaatgtgcaaatgtaattttcaaaaatgcaaatgagtttctctaatccttgcccttccacaaaagaagtgtaagtaagcttgtcttatataacactattccttgctttccatgtaaatttaaacaatatttaggaagctgataacaagttcttagacttccaatgaactaaatatgtttaagagcaaaaaactgacacagaaaacagagctgcaaaactgagcattcaaaaagtgtatatctgcatgtgtgtgcattattaatagaaaagggaattgtatgaaatgagttagataacttccttttcctcaacttgaagcacaaaggtaccttgagtttgtattactatgcattgtatcatatataacatatattatataaaaatacatggatgcatttacatattgatacatagaaaaagtagtgatagacacacacacacacacacacacacacacacacacacacacacacactctgagtccctttaatattgttcgtgtgtgtgtgtgtgtgtgtgtgtgtgtgtgtgtgtgtgtgtgtgtatgtgtgtgtgtgtgtgtgtatgtgtgtgtgtgtatgtgtatgtgtttatgactgaccacatgggacttcaaaacttaccaggggctcatccttgaagaagactgtttgattcttcttttctaagcagcttgactaactgtagctgtagctcgtcttctataggtcatgacttgtgagatttccccatctatgctgacatgtcagctaatgttgtccttttcagatcttgtttagacaaccatattgtagtagtatgaatataatttgacccccattatctcatagggagtggcactattaggagggttggttattgatgtttacgaaatggagtcagaaatagattgataacaggaagtttattagggaatatagtattcacacaagggagctggtgaccaggtttgcaccagagttggagggacccacaaaatgcttcctagtcagaccagccaagtgaaagggccttttgggtgcctccctccttcttaaacccttatgtaaccctgaccatgcccaagcttctttgtcaaaaatcaggtgtttgaggtgtgtgggttaatatctgagttttcaatttgattccattggtctacctgtctatttttgtgccaagaccaagcagaaaaatgggaatcagtctgccacaaaatccagcaattccactcttaggaatatacccaaatgaagcacattcatacaaggatatctgctcaactatgttcatagcagcattatttgtaatagccagaacctgaaagcaacctagatgcacctcaactgaagaatggattgagaaaatgtggaacatttacacaatggaatattactcagtgccgaaaaacaatggaatcttgaaatttgcagtcaaattgatggcactagaagacaccatcctgagtgaggtaacccagtcacaaaaagacaaacatggtatatactaactcacatatggattttcgacatgcatcaggggatggtcagtctacaatccacactgccagagagtctgggaatcagggagtaccttaagagagacatgcatgataccctggagaagaaagggaaggggacaggatctcttgagcagactgcgagcatgggggcagggagaagagctgggagaaagaaatagggaggagaggagtggcgagaacaaaatgggggagcagggaggttgagtcaggggaagaatagaggagagcagaatgagaggtatcataatagagggagccattatagctttgaggagagagctggcagtagggagatttccaaatatctacaaggataacaccaactggcatggagaggctaccttaaatgccctttgccaataatgagattggtaactatcttatatgccatcctagagccttcatccgggggctgatgtaagcagaggcagacacccagagctaaatactgaactgaacccctggatccaagttgcaaagagggagtagtgaagagcaaaggggtcaagactgagctgctgaaacccatagaaatagctgacctggacaagggggagctcatggaccccagaatgatggctgggagccagcatgggactgacccagacctcctgaacttaggtgtcagggaggaggcctcaacaatctacagggactctggtaatagatcagtatttatccctagcatatgaatggactttgggtgcccattccatgtcgggggatgctttctcagcctggacacatggagcagggcctaggccctgatgatatgacagattttggggacccccatggaaggcctcaccctccctgggaagtggaggggggatagggtgggagattgttggcgggggaggggaagtagaagaagctgagattgacatgtgaagcaggcttgtttctaatttaaagaaaaaaattagcatgtttatagtgtcttttcatagcatactgttgagattttgtttgtaaaacttctcatatacagcagactttctctggctccaacaatctttcttcccatcttctcccatgttctctgagccttatatgtgtgttgtgttgtaggtttctcatttagagctgggtatcctgtagaatgaattataaaaacccagggacacatattgggatgctagctgaagatcagaaaaacaaaactgccagttccggatgtttaagaaagtggcagtagtaggttctcctctagagtacacgacctcaccatgagctgatctttggcttgatttatgttatcagtcaagaattctcttctatttatatgtccttaagtccaattggacagctgctggttattctcaacttttaagtgcttctattgaatccttgaagatgtcttcctaagttggtcagggctctgcttcatgtgttttgcactgatttgggactgtcaattgctctcccccacaacagcctgtatagcacctcaagggactactagagctagtcctgaagaaggaagattttgggtcagtgccagctctattcacccaatccagtgtctggtgtcttcagcaatagcttcnnnnnnnnnnnnnnnntttgatccagctttcttctttctctgttcatcaatcctaaaacatattagctatatatacctcaattctaaattgtgtcctagctagctttatcagcttaacacagcatagaaggaaaggctcttgaagaattgcctagaacagtggtcctcaaccttctcaatgctgtgatgctttaatacagttcctcatcttgtatctccaaccataaaagtattttattactacttcctaagtgtaatttttctactgtgataaatgataatttaaatatctgtactttgtgatggtcttaggtagcccctgtgaaagggttattatattcccaaaagggttgctacccacaggttaagaaccactggcctagattgacatacagacatgtctgtgggattgattggtttgttaattgatggttcagtttaggtatgactactcatagacatgtgatcctggtttgaataagaaagctagcaaagcatgaacccctgagtaggctagtatgtgccattcctccatgatgtctaactcacacttctgcttaggtgcttgccatgacactctgcaattatagactattatctagaagtataaaccaaataaaacatttgatccccaaagttttaaccatagtgttttatcatagcaaggtaaacaaaagtagaatgcctcattatccatttaattcacccaatttgaaatagcagtaagacttggtcaataggtattcactcttaattaggaaagtctggtaaatttggtgtgtctcatcaaaaagttttcccagtgatctttggggacttctgtataatccacatagagtttctaatactaaacatttgctacctcaggaatcttctgatgtttttaaattcaatgtgattccagacctgatgcttcactactctttgaatatgcaggacctattatttaagaactatgacagccttgacataaccatattatatttcaaatccccaaaatgaggctgggagagctggctcagcagctaagagtactgctgatcataaagtgaaccctgttcccagcacccagaaaacagcagctccagttccaatgtgtcttatgccctcttctggtctctgcaagtatgtggcatgcatatggtgcatatagatgcaggcacaacattcttatacataaaataaaaataaacacagctttaagaacctagatattagttatataaacattataatcaaatgtttatttgatatctataatgtttttcttcaaacaatattaaacccatatcacaattagggtcatataatagagatagggtaaatcaacattgttaaataaggagtatttggatttttgactttcacattgactactaaccccatcactcggaaaaacctgcactttccataattgaaaatgtgtatgttcaaagacatagctgcatatttaattattcctataagataccagtcatgatgtttatatataagtaggcatgtttataattcatattgtctgatcaatgacagagagttcattaggagctacaaagtcagcagccaaagtaacagcttgcactggtgctccagccttcagtctcaacagcataacatagtatgggacagatggcacttcctcatgaagtggaacacactgtaagagaatgatccccagattaagaaagctttcctgcagagggactgaagacatcattattctgagtctacttggaggtgcagaactctatatgcttgcttatatgcttccccaaagacgggactctcgcattgtctccctttacaaggtgtgtttgaaattagaaatgtcacacatgtttataatggattttgctcaagtccacatcctattccctcccctgtaattcctcttatatcccccactacacatgtttcctccaaagtacatgctttcttctttttaaaatctgttatatatacttagtactaccattatggccatggacaaaggactggagcttggaaagtctcaggggcctacatcctgaagaaagctgactgtccctaatgtctttgtttgtaaacatcactgaatcattcataagtgtctttatttatgatttagctaaattgcaaaattgctatggaaaatcagctttcggagtgccaattcagttgttcagaggaaaaaaataaagtaatattttatacctttttaaaaagatagagtgagatgctttatcctaaagtgacaaataattctacaaagacataaggaaagctattgcaactgtggaaaataggtctcacataaaattggtctagtgtcaaagtcagcatggctgtatcaaaaaggcacagtgagtataaatggatgtataactactcagagggagagtggggcaagctttgggctcctttatctccacagtattactgctgaaagagggataagtggttgagtactagagtcagggttgaaaaatatcaccagaaataggtggctggagagtaaattgttttataaatgtagttgctaaaagtgtgatttttgattcattgtttgtttggttcacttcttttgagacaagttttctttttccatgtagctcaggctggctttaaactaactacagagcacagactgactttctattcatgattgtccaggctgagctgcctggttgccatgattataagcccgaacaatcacacctatgtctaaaatgacattccacaagggaagatatagagccaaagactcaaggcttctttaaaatcactcagaggagctgggtggaatgtttatcattcacagaatacaaggggaaacatgttgcttaacgaaagaccaggaggctctttctagtgcagacgatacctggaagaaaacaccctacatgaaactcaccatttgatccagtggaattgttaaaatatatatgagatacctgctagttctgtccaactccacttgtgaattaaaacaaacaaaaggtttggtttatattggagcaaaagaaagtattaaactcctacaaaatttatagttctggatgacaaatacaacagcaagttattttaatcaagttctcagttccctaagcatggctataaatcaatggaaatgaataaactggcagtttacttttaaaattcatttttaaacatctcagctgaaaaaagaaagcttcaaatgtaaataacaagttaatctaaactataactcactgaataatttcagttcttatccgtagtaactgtgagatatttccactcaacatataaaacagatattttcataataaatacaccagaacctcccatcctttctaacttaatgtaaattttattatatttgttagaaagagactagatgttttaggaatatgattcactgaattggttaaataaaattaaaacatagttttaggcaatgcaaaatgatcgataaggtagcatgagggcttattaaaatctacaggttgccgggcgttggtgacatatgcctttaatcccagcactcaggagacagaggcaggcagatctctgtgagttcctggtgccaggataggctccaaagctacacagagaaaccctgtcttgaacccccccaaatctagaatttaatgaggaaatcaattaaaaaattagaatactttataaagaatcaaattcatttttatttatgagtgtatgtaagcagtggacagcatgcatttaagaaagaatgtgtttcacagggcagagaacgtctccagagttgctgtaataaactacaaaaggcaacctatcatctacttctgcttgccaggaatctgtgtaaatgacagacaggaatttcatgtctcctcatttttcatcgctttactgtaatccatggtatttttgcctgccttctacagtacctcaacctatctccactgtaactaaatttccctctcctatctgtacttctgtttatttccttctttcttttttcttttttattatttttcttcttttgcctttttctccattttttatttaaattagaaataagattgttttgcatgtcaatctcagttcactctgccttccctcctcgcctgacccccactaacactctatctatcccataccctttctgatccccaggaagggtgaggccttccatagggtttttcagagtccatcacatcctttgggaaagggcctagtccctccctcccagtgatcagtctggggaccaaaagctctccgttgttcaggtcagctgtttctgtgggtttcaccagtctggtcttgtccaggttgctcatcactcctccttctttgcaactggattcccattcagttcagtgtttagctgttggtatctgcttctacttccatcagctgctagatgaaggctctaggatggcatataagttagtcatcaatctcattatcaagggatggcatttacggtagcctctccaccactgcttagatggttagttagtgtcatccttgtagatctctggacatttccctagtgcctgatttctgtttaaacctatactggctccctttctgatagtatctcttattttgtctcttctattcttcccccttcacaaccttcctgcctcccttatgtcctcctcgcccctcctcttctccccttctcattctctaccctacttcaatgtgcttttcactaaaatttctggttcaccaatagccccatttacaaatagcttctcatattgagatgaccaagattagagtttcaagattcctgttttttaaatttatttatatattatataaataatcttattttacatatcaatcccagttccctctctctcccatcctcccatgtcccccaatgatgtccacccccatcctaccaccaatccactccccatggagtgtgaggccttccatggaggaatcatcaagtctatcgcatcatttgggtgagaacatttgtcccttctccatgtatctgggctaagagtgtatccttccctgtggaatggactccaaaagttcatttgtgcactagggacaaatactgttttcactgtcagaggtcccattgactgcccagacctcctaagtggcacccacattcagagggcttggttaggtccaaggctggttcctcagctttatgactgggatatgtatgctctcacttgttcagggcagctgtttttgtgggcttctccagcatagtcttgattgcaggcaaatggatagaactggaagaaatcatcttgagtgaagtaacctactcagagaaagacaagcatgatatgtactcactcatatatggatattagacatagagtaaagtactaacagcctacaatccacacctccagagaagctaggaaacaaggagcaccctaagagagacatacattgtttcccggaaaaggggaaagggacaaagtaatttcttatgacattaagtagtaaaataaaaaatattaggatgaaagagtaagaacatcaatttaaggccaaactgaggtctgtctgaaaaataaggtaagaacacacaaatatgctcactgtaatcttctatatgtaaaagttaaatcagaaggaaactggcgaaaattttacaatatctcttttggagacaggatgtagaaagtggtttatttctgcatgggtatgaatgtgtttgctttatttctacctattatgagtaaacagtataaggtgcagaaaggcaaagtatatataatagttaatattgtcaatgaaaaaattctaaacattcccttgagggattatcaaggactatcagtgtaggtaacatcacccccttggctggtgtcctgtactacataaaagggactgctagctgtgtctgaccattcatttctttctgcctgctgtggtaggatagtaggagttgatgtttgcaggttacattgactattctgtctacaggccctgtatattccacaagaaatagctgaagcacaagaaaaaacaacattgaaaatacctatatgaaaatgatagaagcccttaaagagaaaattaataaatcccttaaagaaatcttggaaaatataatcaaaagatcttgaccctttccccttctccgggggaccatgtatgtctctcttagggtcctccttgtttattagcttcttttggcattgtggctcctgagcaaattgggaacaagggaagaggggggagggagctaggagaatgggaaggggggaagaggagggatgcagagaacatgagggagcagaaaggttgagtcaggggaagaatagatgataacaaaaatggagataccataatagagggagacattttgggtttacagagaaatcaggcactagggaaatgtctggagatctacaaagatgacaccagctaacaatcgaagcaacagagagactaccttaaatgcccttccctgataattcaattgatgactaacttatatgccatcctatagccttcatccagcagctggtggaagtagacacagacacccacaactaatcactgagctaaactggaacccagatgcagagaaggatgaatgaagagcaaaggggtccagaccaggctagtgaaaacccacagaaacagctgacctgaacaaaggggagctcttggtccccagactaatagctgggataccagaatgggactgatccagaccccaggattgtgggtttcagtgaggagaccccgaaattctacgcaacctcctgtagtaattcagtactagcctaggccctatcccaaaggatacaatagactctgatgacatcttatggaatgcctcaccatccagggggagcagaaaggatatgtgatagatagggttttagttggggtggggtaaaggaggtttggagggtgaagggaactgggactgtcatgtaaaacaatcctgtttctaattcaaataaaaaaagaaaatagaaacataatcaaagaattggaagaaatgaataaatccctttaagaaagccaggggagaaatagttgaaataaatgaataaaacttttcaagacagttgaatggaaatggaaatgaaagcaataaagaaaacactaactcagggaattatggagatgaaaagtttagaaattctatcaggaactacagcaatgctcatcaacagactacaagaatgggaagagagcataacaggtattgaagatatgataaaggaaagggaaacatcagtcaaagaaaatgtaaagtctaaaaaattcctgacacaaaacatttagagaatcagggaccttctgaaaagatcaaacctaagaaggtaagaaagaaagaataataggtatagaaaaaggaaaggaacccagctcaaaggcctagaaaataattttaataaaaccatacaagaaaaatttcctaacataaagaaattacctaaaaggatacagaaagcatatagtgttgtggaatattagttgagaatgtgatacattgatttatgctgtggaacatttgtttcatgatgcaaagatgtattgcattactttaaattacattcgtttaaacctgtggtgctgtgttactttgcctgtctaaaacacctgactttaataaagagctaaacagtcaataacgagacaggaaacttgatagacaaggatgccaggctaagagaataaataaaaggagaaaaagaaaagagggaggatcaaaaaaggaggacgggggaggccaagggtttgccatccagccacacagccagccaaagaaataagcaaagaaaatatatacagaaataaggaaaggtaaaagctcagaggcaaaaggtggatatattttaagttaaaaagaatgtgttagaaccaagccaagctaagaccagacattcgtaagtaaaaataagtctcagtgtattcgtctgggagctgggtggcaggtcccacaatgatcagagagagagagaaaaaaacaaacaaacaatgcagtacataagatagattagaccccaaaagaatgttcctttaccacttcataatcaaagcactatacatacagaacaaataaaataatattaaagcttcaagggataaatcccagtaacatatgaagaaagacctattggaattacatctgacttttcttttttgttttttatctgacttttcagtggagactataaaagccagaggagccctggacagatgtactgccgatttaagagatcgaagaggacaacccagattactatatacaataaaactctcaatcaccatagatggaaaagttatgatattccttgctaaaaatcacaactaaacaatttctgttcacaaattcaaccctacaaaggttactaggagaaaaactataacctaaagagattaacaccacccattaaaacacaggaaataagcaacctcacaggagcaaaatcaaaagaggggaagcaaacacacacacacacacacacacacacacacacacacacacannnnnnnnnnnnnnagatgggagatagagaatggtcacaaacacaccaccatcaccaccatcaccaccaccaccatcatcaccacctcctccactaccatcacatccatcaccaccaccaaaacaacaaaataacaggaattactaaacattggccattgatacctctcaattccacaacaaaagatacacactaatagaatggattcaaaacaatatctgttcttctgctgcatccaagaaacattcctcaacatcaaggatagacattacctcagagtaaaggtttggaaaaaattattccaagcaaatgaacctgagaatcaagctcatgtagtcattttaatacttaaaaatttagacttcaaatcaaaactaatcaaaagagatagggaagaacacttcatacacagcaaaggaaagatccaacaagatgacataaggtcacccacttttgtaaaagaaacactatttcttaatatctatgccccaaacgcaaggacacccacttttgtaaaagaaacatcactatactttgaagcacatattgattctcacatagtaatagtggaagacttcaatacccagctctcaccaattgacaatccacccagacaaaaactgagaaattctagaccttacaaatccaataaactaaatacgacctaaaaagatatttatacaacatttaaccaaaataaaaagaatatatattccattcagtaactcatggaactttctccaaaattgaccacatacttagacacaaagcaatatataataaggaaattgaaatcatttcctgagttatttccctatttgaccaccatagcttaaaaacaagagaaacaacagaaatcttccaaacaaatggaaactgaaaaactctttactgaatggaaaatgggccaagacagaaaaaaagaaagaaatcaaaagctgggtgttggtggcacacgcctttaatcccagcactcgggaggcagagtcaggcggatctctgtgagttcgagggcagcctggtctccagagtgagagacaggatagggtccaaagctatacagagaaaccctgtctcgaaaaaccaaaaagaaagaaagaaagaaagaaagaaagaaagaaagaaagaaaggaagaaaggaaggaaggaaggaaggaaggaaggaaggaagaaagaaagaaagaaagaaagaaagaaagaaagaaagaaagaaagaaagaaatcaaagccttcctaaaatacaaagaaaatgaatcaacagcatatccaaagttatgggacacattgagaacagtgcaacgaggaaagttcatagaacaagtacatacaaaaaaaatggagagatctcatgctatcaacctaacagcacacctgagacatctaaacaaaaagaagcaaactcacccaagaggagtggagagaaagagataagcaaaatggcatctgaaagcaataaagaaacaaacagaaaaacaatatgaatcaatgaaacacagagttcattctgagaaaacaacatagacaaacccttatttaaactaactaaaagacacagagaaaattgtcatacaaactaactaaaagacagagaaagaatactaaaattcacaaaatcagaaaaaaaaggagtgataacaaaagacaccaaggaaatccagagaatcacacagacatactttacaaatctgtactctaccaaattggaaaatctaaaagaaatggataattttctggatacataccacttaccaatgttaaatcaaaatcagaaaaaggatttaaatagacctataatcccttgtaaattataagtagtcattaaaagtctcccaaccaaaaaagcataaggacacatggttttagatcataatacttccagactttcaaagaagagctagcacaattttcctcaaattattccagaatatagaaacagaaggaacattcctcaattaattgtatgaggccacagttaccctgataccaattctacctaatgactcaacaaagaaagagaattgcagaccaatttccctatgtatatagatgcaaaataattcaataaaacacttgcatactaaatctaagaactcctaaaaatactttgagattgcatcttacccctgtcagaaaggctaagaccaaaacaattgtcagctcatgttgacaaggatgttgactgaggagaataccctttattgctggtttaagtgcaaacttgtacagccactatcaaaatcaattttttggttcctcagaaaaattgatgatccatgtacttcaagaaacagctacactaatcttgggcatatatacaaaagttactccatcctattacaaggacatttgctcacctatattcattgtagctttattgacaatagtcaaaatctgaaaacaacctgtatgtttctcaactaaagaatggataaagaaaacctggtacatttacacaattgatgagtactctgctgtttaaaaaaatgacattatgaaacttggaaggaaatgcatggaactagaaaaattttcctcagtaaggaaactgatacacagaaagacaaatatagcatggattcattgatatgtgagttttagtcattaagtaaatgattgataatcaagctagagttcatagacccagagagagtaggtgaagagaaagaatgtaggtggatgcttggatctctcccgggggataaaagggcagatggaggcaggtggcgataggagtgggagggatcagatgggagatagagaatggtgggagaaagtatggggaaagttgaaattgggagagatttggagtacatttcggaaccctagtgctgtggaaacttcctgcagtatatgaatatggtcctagttaggacttgtagctatgcaggaaatagtgtctgaactggccatttcttgtagtcaggcaatgctcctagtggcaggactaggctatactcagttgagttatttgctgatggtgttccatggtgatcctcagatgtcccaaactggtgctaggatagagggttggtgtgcacaagtgtactgtggaactccttttgctagggcaacatccacatagctaaattgaatgtagaaagattgagatggtgcctacatggaatcttatgtggtctcttgttgctggaagggacactgtaggctaccaaaaagagaatgatggacatcaccgaagtcacaaaaaccttgacataaaatccgtccttcctacaagataagctcagacaatggtggcactgaacttgtgggtgtgctcaaacaatgtttggtttaacttgaggcccttaagagggaacccatctatgactctgcttagatgtcaaagaaccagactgggtagctcagaagagtcaggtagaaccaagaatgactagtctaaaagaatcaatgaaatgattccttatgatattcctgctatactaatagatcagtgccttgtttagttgtcatcagagagacttcctccaccatcagatgggagtagatgcagaaacccattctcagatattatgtagagagagcctaaactggaggtcttcatccatctggtctttccccttgatgctcagggacttcagaagacagagcagaaatattacaggggttagaggggatgggaaacaccaggagaactgaactggcccaaagaatcagctaagaacagagcaaatgggctcacagaaactgaagcaacaagcacagtgtctgcacggggtcctctgtgatgagactggctgttagcttggtgtctttgtgggactattatcagtgggagaaagtgtatctttgactcatttgtctgcttctgggactctttctcctgttgggttgccttgtcctgcctcagtgtaagtaagggtttctaccttgtcttattgtattttccttcatcgtgtttttttgttgactcttggaggcctgctcttctgtgaagggagctagaggagctatgggttcaggggagagggtaggtggggggagatcttggaggagtggaggtagaggaacctgtggtaagggtgaaagaagactctatattcaattacaaatgaggaggaggaggaggtggaggaggagcagggggagggagagggggaaggaaggaaggaaggaaggaaggaaggaaggaaggaaggaataatttttcttgactgagccagagaacctattcttggttgtcaatgtaaatatacctggaatgaactataattcagcaatggaggacacacttgtgatccggatcttgatgcaacaagacaatatgcctttggtctggatcttgatgctggaagaaatgcaccgttaatccagacatggaggctggaagtcaaacatttaatctgggctacaccttctgtcagaagcctatataaggaaaatggaagatggaagatgttcttctcctacttgccctcggcatgtcaggtcatcccttccttcatctgcttctttgggattccagcatatacagaagatcaactgagacacacatggtactgagcagctcctagattcttgaactttccattcacagctatccattgttggattgcagcctgtaagccattccaataaagagagagagagagggaggaagagagagagagagagagagaaagagagagagagagagagagagagagagagagagagannnnnnnnnnnnnnnnnnnnnnnnnnnnnnnnnnnnccataagttctttgaccctgactaatagagtgtacaatggtcagtttgaaaagtacaatttcatataaatgctataagtggagtacatccacatttctaatactcactttatagagacccagatgcctacttgatctgtgacactctcattgggtgcaaagataggcttaatgggaaggtagcctttcaggaaactgatgtttttcctaagcaaagggatggctgtggaataatagtgaaatagagatgcagttttctttgtaaaacacacctgcaacttatggaagaataagcacaaacagcctttgcactgcctgtgtttcaggatgctgtgagccaggtatcacttctgcccctcagagaacaaccacagacccactctcatctcttatgcatgttgcctctatcaaaggcagtcttagatttccacttactttctcacattttcttgacatttttgaaacccagattagatcttcttctgtgtcctgttcatgatgccagtcagtgtaactcttctattttatctggccttgtttcagttgatatattttcaccaaagaaacagtataataatatcagcaccaaatattaaccaaacaataactaatagtattattgattgttaatcaactaattataatatctgtacagggagtttctgcccagcctggaccgacagccatttagccccaaataacacagagagcctaatattaatgataaaccgtttggtcgatggctgaggcttcttactggctagctctttcttagttattcacccatttctattaaactgtgtatctccatgtgattttggcttaccatagaaggctcaagaatgttactctttcataggctacctggtatctcccaggaggcttctctctgccttcctctccccagaattcttctagtctggtagaccaatctatactccctgcgtggctactgggcatcagtgtttttgtcatcaaccaataatggaaacatatacagaagaacatctcccatgtacatcaaaaatttccaaattatttagtaataaaatagcacactgctaacttcatggatttcctaattactggatgacaggaaagttattgatgacctaaaactccagggtgagtaaaaatggacactaagggatgaacatgttaataagactgtactctggctgctgaagtagagaaaagtctaattatatctaagtgaattattaagggactggtttctaaattttgaataagctttgtgtcataaatttcctcccaagtaaaacaaacatcattggacacagttataaacagacatccttataactgtgtcatcagttaattatgatttctatcataaaatattacacccattctttttagagacaacatgaaatatcattgtttcttttttgagacagggtttctctgtggctttgaagactgtcctggaactagctcttttagaacaggctggtctccaactcacagaaatctgccagcctctgcctcccaagtgctgggactaaaggcatgttccaccactccacagctgaaatgtcattgtttcttatctaggactttttgttccttattgatgttcaatgattcctgagatgattgttcctttcactgatcttgaggtagtatcaggcattatttaatagatcagttccgacttgtaactttcaacttatagaggatctgttttctcattttacatctttgaaaaataaaacttaatggggatttgagtggcaaaggagacccaaaatctgaataccattcttgttacccttgtcttctacaactactgatggcattaagtaaagtacactgtctaattaattatgctgaagacatcatataaattagatatagtcaaatcaaatcagacatagagtcatccaattcagctattaaaagattgttaagtacatttactaatgttactttggttgaggagccaggtctccattcagatagctcaaagtctttcatatgtttccattcatccatcaaaatgacagatcaaccaataataatcaagaaagtaaaaggcacaagagcagggagtgattaaacaagaaatgctgccttttgaaataaggccccaccacatgtgattacaggtttctcttctcagaagcctcagtgaagcaagtttcttcccattggtttattgacgcatttgctgagcttttaaatatttcattccattttaatgtttattttattatgtttttaactgtagtgtatttttaatgtgatcctcaaaagggggtctttttaaccttaattattaattataataaagccataagaaaatatcccacaatgaaaggataaattaacaatttatgataccaaaataatttacaggagtctattgatcccatgataagataaagaatattacataaaaagaagggagatttgaatataacatgaggataagtaggtaattcttaaaagtgggagtatcaaggacatcaaaaatcactactgaatgcagcttctctaaaaacagaattccagacatacagttcttgcttcacaaagaaaagctactgaaattcagatgactttgttgacattgtttatcatacacaccctttaaaatgcacaacagatgagtatgcaattagacaattcccataggccccacttggcctaccctttcccatctctttctctcttaaacacaaaataatatcccttttgattctccattttctgtgtatgagtattttgcatgcatgtatgtttatgtgaatcttgtatgcttgctttaaacagagccagaagagggatctgatatctggaactggagttagagatggttatgagccactatgtgcatgtgcatgctggaaaccaaactccactattatgcacaaagagtcagtggttgtaactatggggccatctctcctgcaccgaacacaatattcttagtaaagataaaatggtgaaaaaatcccaactaagtaagtgtagtagtttgaatgaaaatggcccccataggctcatagggagtgatagtatttgaaaggatgaggatgtctggccttgttggagtaggtgttgccttagaggaggaagtgtgtcactgggggctggctttgagatttcagaaacttagaccaggcccagtgggctcattctaattcagttgcctgccaatccagacatagaactttaggctcctaccataaaatgtctcctgtgtaccaccgtgcttcccaccataatgatgattgaaaaaacctctgaagtaaaagccagccccaattaaatagttttcgttataagtgttgtctctttacagcaagaaacccctacctatgacagttagcatccatcttattatctagaacttatctaccactgttgctttataaaattgtgagatggctgaaatgttgtatggtttgttgtacagtgctcttcaggacaaggtgagagaaatcagtagtctcttaaaatttgcccattatgagtggtctaatattgtttcacaatctatattggctatttatcttgtgctcatgaccaaacatctgatagaaccacttttgagagagaagatttcatttagttcctggtttcagaggcaagtgagccatagagtccagatcatgtggctgttactcatatcagggtgaatcaagaagcagagagatagatgatgatactcatcgtggcttctgggtttctcctttctattcagatggggttaccagtctacagagagagttactgcaccagcttcagctcctacctttagtgtgcctattccttcctcagttggttctcataggaaacacccttcagatacccacaaagggatgtccttgactccttaagctcaatacaatgaggactaaccatcacaggacctaaattgagatttatgtggagattcctttgtgttttgtgaaatgaattcatgttttcttagagtgagtagagtaatgagggtgggactgaagaaaaatgagattttgagaatgaatacacagggggttatgtcttgaaagtatgttaaatgtaaaatactgagggtttttttttccttccattagaagaacaaaaaagttagtgtgaaggatgggaccattctctttgcaatatggtatttcagatgtttgtttgtgtttatatgaccaaatacctaccaggaacaatttaagggtggaaaggtttatttgccttacagttctaagaagtactgtctatcaaggcagggaaagacaattactttgtaagaagcaggaggatattgctggtcacatggaatctgcagtcaggagaaagtgatcaatgaaggaatgctcgagctattctggattttctcctttaattcactctagaattgcaaatgccactgacgctatttagagtggatcttcccctgtcagctaacctaatctaagcaactcttcataggcatgctcagaagcttgtctcttagatgtttcagccacccaggtaagtagcaggatgaagaaaagacttcagtgatgaccacatttgaggtcaaagactgatgaggacaaagatggccttcttgccaccgtatatatgaaagatgtactttccttgtcaatataataaaatattgtagagaaatattgctggcctattccaagcagagaacataagttatccttaattctgttgtgatttactgtttttgctatgattttgcataatcccttgcagaatgcaaatggtgaagtggggaagaaataccaggtgaagagtgaaagaagaaagctgcaagagaaaatgtactttcctaagtgtcacatcaatgcccttatatcatttcataccagaatacaccagagttctcattataacactatcccatttcctaaaacttctaaaagataacttcatctttatttagatttatgacttgtttcaatagcattgcaaaagcatcaccaaataaaagagacttggaaataccatcaaattgaggattactatatctgaggaaataacatttatttcacaatcactactttgtaaacttagtattatgacaaagtacacatttaattaatggtatgaaaagtgttcatatttctttgatctgcgtaggcaaaaactacactaatataaagaatttagactgtatgggaaagctcaaaatcatacattttatagttaaaatttctcaggacctaatagttagagcgcacttgtaatgacagaacaacagtataaacattacagtggtcattcctctgaaagttataagcccacatattggtctgaagccaaaatagaatcatctttagggtattccatgagatggagaaaacatgacatacaagggaatcaatgattcccaatgatattcaaatttccattttcatcataattgctgttcctgattttgaattaatactatttagcaacattcagccatttatacgctagagtaatattcaagtataagaaaggttgatgtctacatcatatatctcattgtactactatatgatttacctaattaaattgacctgaagttattcaaacatgaaaactgtatggcatatagaatttaatttttttctgtgaatgtttacctgcattctgatttttgagtcatttttcatcaaacatcttcagaattgagagggattttataagaaaagtcaatcacatgagtggtttcctttctctcatgtggaagggtggaaggaagatgactttctcaaggagaaatagagtctcacagcttaccaggctcctgaaggcagtcacttgtgctactccatatcataacatcagttgatcctttactgcatattttgaacacagtttttaagttttcttgctacagactctcagttttcttatggatgccaatgccacctcacacagacttctctgctgtgtgtcttgcaccagtcattagatgaagagcaccattcacccagacaccctcactgcttccagctctagctctctcaaggcaaggaaagttcagcctttgcagggatctgtgacaactgcttattaacacatgatctatctcttaggatatgacttcctgaaacaaggttctgttcacattctaattttgaatgcacttaatatactatcactcagtatatatgtaattgtagtacatcacacaggattaaatatgtatatatttatgcatatatgtagatatagttcttctgacaagaacacacacatttatgctaagtataagacatataaacactttaagaaagtaaaattttatggagaaacagtgagtcaatgactatgttgtagaaaaatatgatagtgtatctttgaacaactactgtgaatgcatagtaggcagatatgaagttggtaacattaaatatatgtttctattatgtagagcctggagatactgactaaataagcacaatagttgtgaaggaacctaaaacaccaaccctcagcaagactccaacaaactctttctctcctttctctcaattctccaaaaacttaaatggaaaaggtgctactaaacgttagatacaaccttctaaatttcatttctaagatagaattgcataaatataagctacaatttgatagaaaagtcaaagaatataatttttcctcaacacctaaacacaggaatcttttacatattcagtaaccagaaaatcttggtcattgaattaccatgggctttccctttatcttggttatgagaaattatcacactatgggttctgaagtggacttagaactctggttctgattttattctactttccccctttgctacccttagtatttatttataagaagctaaatttaaggctgatactccagtagcagaactgttcacatgacctctctctctagggttgtccaatcagcaagctccttataaaataaccacatcttcaatgtgagtaattcacatacctgctggtgaccatgtgcatcaattggtcacatcagaagcaactcaacaacctggaactatttgagaatgttagaattgcctttgtataccttcttgtacattgatgtgtgtgagtgggcacatgcgtgtatctaagagtgagagagagagagagagagagagagagagagagagagagagaaccagcagaggccataaaaggttgctggttttcttcaagttattaacttttttgacctaattgctcttaactacataaccatctctccaacctctaacattgtctttaaaatctagaaagatgcattcttgtcttggatgtttttcttcacagtcaattcacattcagtattaatgtgtctgagatgatcacatggtgtcttagttcaagttcaaggcaaatcttgaaacaactgatcacactcagcaactatgtggctaaatattataatgttcagtttcttttgttataaaaactgaaagaatatatttaaaattaagttggtcctttatgtaagtaatatttggaaagttccattaagcataaatttctatataaatgacaaatgtcatttttcttatgatattatttatagacataatattttgatgaattttcagtacacatacaaatactcaagtgccaagaaaggaaatgctaaaactttttaggagagaattgatttcattcttctcaagtccttaaaattatatcctgtgctttttatgtgagggtatgtctgtcactcacgaatgttttgctgtgagtcctttgaagtcagattatatattccttatttgaaatctctgtgcttgtgtggagatgaaaagcagttgcctttgaaagtagctcatgcacaatttgtgtgtgtggcagggggaagagattgctgtgctagaaaaacttaaaggtttatttctcctcatagacaagtctaccgttaattgtcacatagagtcacaatgtacacacatttccctgatttatatgggcaaaagacagaaatgccaataagatggttcatttttaatttgaaaactctgtgttatttgtggagatagtggggaatgtaacatgaattcatggctcattacacaagttttcaactccagcactgatccatgaataggttcaaattcctcttctgcctcaggttattttcacatgttctccatcataatacaaacacgcaaaaaaaaattacccactgaaaagctgttactggacataccctggaagattcttctgtgtcttttttttaaaataaaaggttccttttttattttatttttttttcattttacataccaatcttttttttttattacttctagttagggaacaagcttatttcaagtcccttacataccaatcttaattccccctccctcccctcctcccactccctcctccaccaatctcctcctcaaagagggtaaggcctctcttgggtagtcaacaagcctggcatatcaagtggaagcaggactgagctcctcccagtgtatcaaggctgaacaaggtctttcaccatagggaacaggctccaaaaagccagttcatgcacctgggataaatcctggtctcactgccagggtccccacaaacagatcaagccacttaactgcaacccacaatctgagtgcctagtttggtcccataagactcccactctataaatatgtcagtttggccaaagagaataggttaattattgaacagtgagaacttaagtcatttttagtgagaaataaacttaagtcttctattttcaaagtctctgagaaggtgtggtatggtggtgaaatactagttttccaattctatagagagagaatgtaaatctcaaaagtaaaatcctattttgtgcctagatttaaggggaatatatatgaaatctttcttgaatccaaatactatctaatgatgtcaagtgccagcaagcaagggctgggtcttattatatatattctctcctttctctcaattctccaaaaacttaaatggaaaaggtgctactaaacgttagatacactagacagaacctactgttcctgatgatacaccaatttcccttaaactgttaattttcatgtctcatttaattaagtaaaattttaattcattctatgacttgaaggatacttataagtacatatgcaaatgccttctatgttttattgatgttcttttgggtagggtagtaaaaactataggattcctacacaataataagatgaagatttccctttgatctaagaaatgtggtcagctacctattatttcaaaaattcagcaaagttgccaatgagattcattgacattatagtttcctttcttgaaatgtaaagcaaattgccttaacttattctacccccaattgagaagttgttcatcatgtaaaaagttacaagaagattcaaagttctagaaaggagctcaagaaacatttagcagcaacagctcaagttcttcctaccgtcagctatagacagacatctggcaccctccatgctgtccttactaatcaaagctacagttaattggcaacctagaaattcatgtcaagatacccagaagaaatgagaacttgtataaaatgactgttttgtgacatgcatagtagattcattgatagcatattccaaaatgaaaagaactgaaaagtgcaattattgcaggattatttagagtatgctggtctattatgtctcctaggaaattttaaaattttttttcaacttctttgaaaaggggttttattctatgtagtctgtgtacttgtaactaaaatccaaatgatacaaactgcatcctatagtgtgaaggatttggaacatacatacatcagtgaaatgattaccactgaggacttgatgggttttatcctggtgactagcaagcactccttgtgtctctgcaaactttcagcatccaatttaagatttgagaaaagagatcatacattcaaagattcattctcagaaacttgtataaaacttaaaaaactgatttcaacaccttataagtgacataagtggtctgaatatgcaaattagtggcttttattcatgattaaaataaggtcaatgaaaaattgccttaaaccatgttcctgagaagactaccctcttaatttataaatgtcattctttagggaaagtaaccatgtcacatgatatgaaatggtctattcatgtaccaaatgtaaaagctgtacattgagatgttccacaggtgacagtcacatacttcagccaccaatcactccagaactcagggaagcaggagttttggaacagggatttgggtccttgaaaaatggatcctcttggctgcattaataacaaaagtggcactgggcatggatttgtgagtctggagtatagcctggctgtgttccttggggtgcaggggccaccaggaacagccaaagtgaatggaatcagttgtagattctgacactgagagccacatccactttggtgaacagtttttgcttctgtgacacatgcaaagacaggaagcaaacagaaggaaccaggtgaatttttcagtcctcctactcccctatgttacctgccatgtattgtctcctccaccaggcagggtctaactgagaaccacatgataatgtggcttacagtgtcctaactccaacatcacgaagtagttcatgagtgatagctttaaagctgaaagtaaagcttaataacagcacacacagagtttcccaaaaccctttatgccttatttaaagtgaacaacacctgtcactctatacatgcacttaaagatatccagaataaattgatggtgtgtgtgtctgtatcagtgttcagtttaggctctactactattgcttgtcttaaactatggcaacacaacaagacactctcgctgaaaaggagaaatgaactacatctggaagactgtttcagaatgtttcaaaacagaatatagttttcttccacattcacatatactcacagaaaaataagctaaatctttcaaagataatcagaaatatatgcagttaatagtgaaaaattagaggacaaataaccttgaatcatttagattttaaataaaacaaacctctttaattagtaatatgaacagtttccatatcaactgtatcataattaaagggaaaacattttgtttctaaggaaactacttagttcagttaataagaatatgctgtataattgaatgtgccacctagatgctgaactgccaaaattgtttatgaagcatgaaatcttgaaaaatgaaagtattatgccatatgataaaattattttaaggagtatttgaatgaaaacaaaagacagtgctagtagccatagtgctattagcaatagaaacacatgagatttcggtgctattatcatttctcagatcactcattcatggtttatatgtatggtgtgcccacactgagaacttaaaattattttggcaatttattgtctcattgaaaattgaattagggtctttagaggtaccctaatgtgtttccttgggagcaaatgctttaatgaaaaagcatacaaggattggacatgattatgattagctacccaaagaaaagcaggaaaagaaagcccttctccaggccctgtgactgcagttggccaccaggtaatgctgttgtttcagacaagtgtggaaacttcaggaggtgtggcctccaggaggaactggactactattagagggctatgaggtttcacaagctcagccccacttcctgactaccctcagcttcctatttcttcagaatatgagatatgtggtcccagatgtgtgcttcaacagacaaggatctacccattggaatgccatgccttcccttccatgactgactgaagccctttcaaccagtgagtcacaattaacactgccttcctttctaattaactaactcattgaaatagaattttggattgcattttaatttttgtcattgagcattgtggctgcaacttgacaaatgggagaaataggggagtactctcaaaacatatatacattgctctccatatattatatactatgtattgacttgcatatatactgagaggaacataagagagttgtgctgagactaagaacttaggacataataagcaatgtatgcagaagattttgagccgcggtcctcaacaaaacactagcagatttcccttgtagctttaggaaaatggacttaaattcaggtatgagtttttaaagcttcaaagccttgttgcacagaagctgctgtcctgatgtgaagggagtctgtctctgtagcttgcttccccctcagggtttttcccctgggtgatgtccaatgtcagcatttagcttgagcagatgttgattgcagtctccagagagactgttcctttccgggggtaagcattcctgtgtgtgcaccatctagacctgaccagctcccttgttacacaaacaacagagtgcactgccagctatgtccctaaagaaaacagagttaaggatttctatgtgtgtttatttttctagaagtttttagtaattaagacacattacattctcttcctccccagtgttcttatcacattaaatatgctcttaaaaatacttgccttttccattttccatgtctgtttagcactaactgttcaattacatgaatcaacttctgtttacttatttatatttcacttattttaccatatacatatgaaatactatttgttgttttacattcttagatattagcagcatttatcttgactggggttgcaatgatagtaaaaactatattcagaaggaaaattataaattcatttttgtaacttcccaaacattacaacacatttaaaaatttctctattttcagtgtgtgtgtgtgtgtgtgtgtgtgtgtgtgtttgctgagagggtcatttgtttggttgtttgtttaagacagtatctcagtatgcagtcatgtttaatgcccactgtataaattgagcaggcctcaaactgtagtctatcctgtattaattaggggttctattgctgtgaagagacaccatgaccacagcaactcctttaaagtaaaatattaattgggtctagcttcagttcaaaggtttattccactgttgtcatgtctggaaagatggcaacatgcaggcaaacatggttctggaaaaggatctgacagttctatgtgttgattcacaagcaacaggaagtgaactttgtgccacagtgagcctggcttgagcgtagcagacctcaaagctcactctcacagtgacatacttcatccaacaaggctaaacatactccaggaaagccatacctcctaaaagtgccactccgtttgggtgacattttcttttaaacaaccacataccctatctgtttgtttgttttgtatgtttttttgagacaggatttctctgtatatccctggctgtcctggaacacactctgtagaccagactgggctcactctctcagagacctgcctgcctctaccttttaattgctgggatcggaggcatgcaccaccattgccaggttatcctatctcttgaattgcaggtatataccaccatgcctttatccttgattttcaagctatacattctatattctaaataatttgaaacttaaaattttgggatcccattattatgccctattctagaagattattccaaatatcatttttctttgtagcattatttatttatttatttatttatttatttatttgtttgtttgtttttctcatttggcagatcctctttcagatagtattagttcagctcatgggagggttaactcagttgtgtcaggattcatattcctttacctttaagtctagaagcatttcatatttcttcgccaaaactttcaaaatcctgttccattgtcttctgctttgcatatagtttctcataaagtttgtgaaccctctaatctgtgctattccatgtttattctctaacctctgatctgcaagttttcattggttataaaaattcattatgatgttttcagtgtttatcgtgtttcttatttctttgttggtaaggcagtgtctcaggtaacactggctgctccaggacttctattaattgattctaacattgaattcttattccccccacttcctccactcaagtgaccctgttgtcactatgaaaagaaatctctgcttgttattgtactaatcagaaagactatagtaataataatgtaaccatgtgaccaacttgtatttcaggagaaacataggtatttatatgctaaaaggcatatgtacaattgcaagtaagctgaacatgtaacatttctgcatctatacatattattttctccattttgaatatcagaaaaatcaacatgtcattgtgaaccactcagagatataacttgtaaaatatagaagtaaaggcatgtgaacttcagtaatcaagtttgacatcacattttactttcaaattattaaataaccaaaagttattccttaagtaagcttgataaaataccagcacaaatttatcctttaaattatctacaaatcattgaaattattttcaaatttggaagacataaagtataattgtattataaatacttttatataagtaatccttatagtctatcacaaatttataattccatatttataagtgttaaataatagtgtcttatttgatcactaaaatatttcaagagttcagcctcattaggcaaacatcactctttcattagatgttttaagccgggttcctctgggtattttgttgaggcttcaaaactgttaatacataatttcctgcagataaaaacttttttcaaatgcaaagcaccactggtcagtgactttattcagttcactagttaatatgaaaaactgcatgatgttaagactgattctaattgcatttgaaggattgggcttcaatttaaaaataaatgatgataaataatactttaggattagttttaaaactgagtcgtgtcctacggagaaatagtctttcacatgtaaagttatcttttgaaccaagcaaaattgtgtgacattttaaactaaaattattctacagcaaggtacttcattaaatctaggacttttactcaattgccagcacccacatgttgggtcacaaccatatgtaactgtagtcccatgggatcagaagccctcttctggcatgtaaatttacatacagacaaaagaccatatacttaaaggacatgaataaatctaaaacaaaaaagaatgtgaccaatcatcacaggtcaaagaaccaaaattatagtaataactccttatattcacatttataattcaaaaataaatctaaatttcaaatttcattattacaaaaatttgacaaactaggttaattggatagttataacttatttcacttgcaagaatgcatttattagaggagatcgctcttttatatctaagtggtgtttcctacctgggttccttgctttcattttcaaaatattcttggaatcaatcacagaccattccaccataatctaagtaacactttgagtatgctgaagtatttctgcacgatgaaacccatatccttatgtaatttcatcatttatctttctgtttgccacttaaatgagcaatataattaaatttggcattaggatggcattaatactgtgttgtaggaaaatctctatggtttctttcttactagaaaattaagaaaccaaatgactcacaaatcaaacatagtatgtgtcctttaatgaaaatacttgacactaactatggcacactgttgttttatggatttactaatccataataagtgacaagtaatactctcttgaattgaagattagttaacacttaagcctttttatgcttgtcatttttattctctgatggacccatacctctgagtatccattttatgctgtattcatctctgaatataaaatctgcctaaaccccaggtaagctgatgtttctcacagaaagcagccaaagaatgattatgtgcttaagggcaaactgtaggcattgttctctgagacagctggctctcaaacataccctttggttagctctgccagagtattttgaatgttactttctctttaggaagatgaaaccaagccaggaagtctcttcctttgtgagtgagcaaccatgatatgatctcaataatattttcattattattttttccttttaaaatatttatttatttatattttatgcgagtactttgcctgcatacatgcaagtgcattgcatgcatgcttggtagatgcagaatccagaaaagaacagtcgactccctgaaactacagttatatagatagctgtaaactctcatgtgggtgctagaaccaactatttcttttgcaaaggcagcaagtacttctaacccatcagtacatatattgtgactggggatgcattttccttctttcagaaataactgttaaaatatatttttcattaacagtatgctactgacatcactttaaaaaattcacaacaccaaccaaaatcacaacataatcaataattttcaaaatggtactgtatatattagaagcataaaacatacacacacacacacaaagtcctgtaaaaacatgaagttggaaaaacacaatataaaatcaaaagacctagaagtttaaaagaaaatgaccagagaaagcattatgaggtaaaaatcctccaaaaatagcattgggttcattttgtgtttacatctagctcttggcatgaggcctgccctaaagtttggtttgtataccaaatgagactccaggcctgacacacatgtgaactcacagtgattctggcaacatgcacaaggccttcacaggtccaaaccaggtgggctcccaacactgatagggaagtgcacacaagaccccatccctaatccagaagctatctcctgtagacaaccacacccaaaggaaaacttggttttccccttctgggtttcacaggatgcttttattacttttagttgtcatgtactcagcagactcagttcaactgtcaatcccaaggaaccaaagacagggtccaatgctcacatggtctttgtgacattatgcactgtttctaataatgcagacagtgtgaatgtctaggagttggatcaacacactatgtacacacacacacacacacacacacacacacacacacacacacacacacatgatattatgactcttgccataacaccatggatataggaagcattaatctgagtagacaatgtgcttttttttaggatccccatttttaaattgagggagtaatttgtaatcctaaaatggtgttatgttttcaacagaaacaaaagtttcatttagtgtacttttttctgtaggtatctataacagttttgcattgtgagaatgtgaatgtggttgatagcaaatattaactgtaaaattgtgagtacataaactataaagacttgaatttttacctgcagttactacatcatgaaatcaaagactctgtacacattgtttaatttacttctttaagttgtgataaattttcatgaggttggcaagaaagagtcatctgtggttttgtaaatttaaagattcatcagctattaaatgactaactataatcatgtttttatttcttcattcaattctatcattttgatctatgtactttgaagaaaaggaattgtggagaaaaatgtttataaatattaaatacattttcatgattgattataattcacaatattttccttgggtaattttctttgatttatttttattttactttataaattctcattatagccttaaactatctataagatcagcttattgtagacatttttattgttttttaaacagttacatttggacattttagattgcccagtttagacattcatatttaagctaaaatgaattaattgaaatagtatcttctttttctgtatgtttaaatttaaatataaatattaatttgtattttagtgatactattgcaactttatgttatttcagattgaacatactttacacttctaagtgttacatatcaattcaactatattgttaaactaatcacaataatttaattttgctttatttttcagcttgttcacaaaagttatttacatttcaaaaaaagaaacaagaaattttttgtattttatttatttctcaattttagggtgaattgaaaaatattaaatgtttctttttcattcacctattagagaaaaatacaaaaaaactgaattattttttatatggatagttttgtctttatcctattctatttaaccaaattcaatgtaaactcactgagtgaatgaattagttttactaccaagaaaatctgattctagatttgttatatatactaaccatataattaaaacattgctagggtgcatcgtggttttatataggaaacatgaggaacacactggtaatagacaaggtagcacaaatacctacacattattaactgtggtatgcctgaaaccaaaacaggaaaagatattagctttctttgttagatgcatgcatacatttgagataaaatttcaacatgctttattcaaatattcattgaaattttatattactgttgtttttccatatatatgcaaaacttgtaatgatcataaatagggatataatacataaacctcattttattcttattaggaaaataaaaccacataaattttgcagtttaaatgcaatatatgggaagttattgactatatgggtataaagcaatagtttctattagcaatttgaggtgataaatatcagacattaaaatatcatggaaataaactgaatctaagcatcttcaggatgagaaatcccactatattgtttgatttgctaccaatcaggttcctgtaatctttttatttacactaacaaccataataatttgtatataatagagttcaattttgaatttatgtgtctaatcaatacaataatattaagtgtggttgtttgaataggaaggggccctatgaactctcagatttgaatggtttgttgctagtgaatggcattattaggaggcatggccttgttagaataggtgtggtcttgttgaagtaggtgtagtcttgttgaaggaagtgtgatacagaggatgggctttgaattttcagaagcttaaaccaagtgtaggggctcactaattttgctgcctgctaatcttcatgtagaactcttagctccttctccagcatcatgtctgtctgactcctgccgtgcttcttgacatgatggactaaacccatgaactgtaagggaaccccaatgaaatattttccttcgtaattgttaccatggtcacattgtctcttaacagaaacagaaactttaagtaagacactaaagcactggttgtcaacctgtgggtcacaatccctttgggggggaaaaatgacattttcacaggggtcacctaagaccatcacaaaacaaaggcatttacattataatttgtagcagtagcaaaatacagtaagggaatagcaacaaaaaattttttttgtgttgggggatcaccaatgtgaggagctgtattaaagggtcatagaaccatgaagagtgagaaccattgcaccagaagtatttatttcatacttagaagggacaaaggggcattattttttatttctttatgatttaactagtatcttgtaactgttttcataattgcctccattatcatctcttgcccttctcttactcttactacctccttttatcccaggtagtcaccaacctgcatctatgtcattttgtacatgcaggtcttgtgaagatggtcacggccacaggtgtgatgtcttcatgattacaatgtccaatttatatcgcccaaacagcatttcataattctcttctctattctctacctcttaaataaggcttaggaagcagatcagacactatctcacttggcaaaacatcagtagtacatgattaataatggttaaatgtgataaaccagtttggagttgaaaagttcaaatcacaaatactgagaagtggcatcgaggcttataatcatgccccaaaatctaaattacaaattttgctatcagataccaatgaacacataatatttttaacaatgtattatagtttttcctcaaataataaggaaatcaacaatatgtgttgcttctttcctgtcagtctcagtaggagctctaattctatcttcctcagctttggaaccatactgcaattatcaatttccctagtttttagactttcttgggtcaatactttgcaaaccaaacatcatgaaactgcttagctgtagatagaagttttctgtcctgcctggtcccacagctgtttaatcccaaataaacacacagagtcttatatcaattataaactgtttggccgatgacccaggcattttattggctggcccttttcttaattattaacatatttctatcaaactgtgtattgccacaaggctgtggcttacctgtaattctctggcatgttactcctttggcagctgcatggtgttcctctggcaactctctgtttttcttcccaggatctggtctggtagctctgactatacttctttcctggttacatcctgcctgtccagtggccataacagttttatttaccaaataatatagaaacatatatccaaagcatacagagaaaaggcctctagggctatagtagacaaggcaatttgagcctggtgatgagaaaggttgtagaaacatgtgcatgcagaaaggtccatgattaacatgtctgtgtggttctctgaacagatttgacattctgccatgaggagagtccaatgtgatttcaggttaaaactgtaatctgtacaaccatggagttcttttacctcatccttttgattcagtggcatagatgaagttcagaaagtctctgcaaaatgccaatggaaactgtaagtaaaagtgagtaattatctaccttagtatcaaatgtagttgtttaaaaaatgcccaagtattcatgttttaaaatttcgtgcttttcctgtatttgtttggctaccatagatcttatggatttgcataaagaatgtttttgtaaaaagtcctttatattggtgtctcaattacattagttttcacatttccattttaccaagaaaatccttaacaaatcctgagaaactaaaggtgcagagtttcaactttccacatacatgaaaaggctggtaatgtgtgtctagttccagtgatatatatgatttaaaagtctcaccacctaattaacttttaatgaaaataaaatttctaagaatccccttgtattttcaggtggtatcagtcaatagcattgttccagttgtttatcctttactaattaggtaggtcttcagtgttctcattcactctcctatcagtgggttcttttattttggacatagtcttcctattagcattattttgtggttaacaatctctgaagagcagaaatattctatagacactaatatacagatccatcactatctgctatgttaatgtatcagggactctggagggttgactaatctcacatataagtctcttgagctgttattgaattaaatcatataggcactaatttcaacataaatcttccccatccccactccttctgtcctataactataccagtgagtaagcacatgttttcctccaatttattgccaaaactcttcaccccacagatttttcccccaatacaggcctacactgcttaaagaataagaaaaataaatattaaatgatacatgaaacctattgtaaatcaaatatatagtccttttttacacatcagttctcttaagttttagtctttgaaagattaaaatgtcataatcatagaaatttaatgacttccataagactaattgggaactccagagtaacatataataaagtaatagaaaataatgattttcatgacttttacatcttaaagccatatatggatttttaaaatgttttagagactcacatattgtcttttagttccagacctttctttattctctgagagttaattgtatttcctatatattccacaaatgtcaaactactcaagattaattatttaaattatgtattatttatttagggaggaagagatgagaaattctttttatctaaattctttaaaaaagtagtgtcattgaataattggtttaacattttgtcaactttaacagaggtaaaatgtacagacattcttagtcacaatagtaaaatgtcatggcaccatacttggatctattatattcattattattagaatttagggggtagtgagaggtgggatagaaaggagtgtgaaagcctatggaattcatgtgtagttttaaaaataaattacaaagttgtttttttctttgctactgttcaaacattgagaagagcaaatagcttatattttgaatgctttatattttgaaacagaaactagatgggcctgggcttgaaggcaaagtcctataatcccagtgcagaagaggctaacacagggagaaagatcaatgtttattcttatttttattttgtttatacaaccatcattggttgtgtgtaatgcatttgagccatgtgtcacaccatataagtttgggaatgaagaactgtatactctttgttctatagtgatttgtagttagcttggacttaggagtgctctaggacctacgcaattttctgttgccttaacattgcggtatttgcagtgtgactagactagagatgataatggtcaaagctggaacttctgggaactggcaaggtttgaatttttctattttgttttaatggttttgaagggcgtaattgaagtcatgacccctcatttgccaagcccatgccctcctatggctgtgcccacagtgtcaaggaggggaagctacaaagcatcacagaatcacaagcagattacagggacaggtcctcataacaggtacatattctaagtgaaaggtaggtgagaactacagcaacacacggtgtctacactagagatgttcaagcacattagaagaagctttgagtcacccagcaataagttagctggattagctgaagacttactgaggacaaagaggaagggagtaggacacagaaactatgaatctaatcaatgaccacactattccaagctgatttcttcttctttttcttccccccacctcaccaccccatttcttttttcttttttttttttttcgagacagggtttccctgtggctttggaggctgtcctggaactagctcttgtagaacaggctggtctcaacctcacagagattcacctgcctctgcctccccagtgctgggattaaaggcatatgccaccaccgcctggttgatttcttcttgttttgcttttgaccttagatctgttatgatattcccattctgtacctaaacattcgcctccctctgagtgtttgtatttgcatacagtacaattattagaagatcatttttaagcctataattggcttattgtgtcttttatttaattaagtttttttcttacattatttttcccaactttttttatttgaattagaaacaggattattttacatgactatcccagttccgttctcccacctgtcctcccctacccccccaactagaaccttatctgtcacatatcttttctgctgcccctggatggtgaggccttccatagggtgtcatcagagtctttcgtatcctttgggatagggcctaggctcacccccgtgtgtcttggtgcagggagtattcctctatatggaatatgctcccaaagtccacctctgatctctcctctcccccaccccataagtttcctctgttaaaccattgactcacattgaataatagcacagattccttgactagtttttattatgtcacactaaaagaaagaatgggtttgttaccaaaggtaggagctgaaaaaagtgtttaaaaaaaaaaaaaactcattgtcacacaacaaataaaagacccagagactgatattggggttcaagtttcaagctgaagattaaaaaggaaagcagctggctgccagctcttacctctacctcagactgaaaggcaattctggctccaacaaacctcagactgcaatcccaaactatgatcctctcctcaacatggatggacaattttgaggctgactactgaagaccttgctcctatctttgttttttgtttttgttttttttcactttttatttactttttattttagaaataacctttttttacatatcaatccccccattccctcaccctccaatcctcccatgcccccacaacccacccacaaccaattacccaaggatagtgagggcttccaggggggataataaaagtctgtcacatcatttaggggagggactaagcactctttcaggtatctgggctgccatagtattccaccttagggaatgagcccacaaaattcatttgtgaactaaggataaacactggatccattgttagaagtctctcagacttcccaggcctcctatctagcactcacattcagagggcaaggttcggtccaatgctggttacccagccttatgactagtatctccatgctctcactgggtcaggtcaactgtttctgtgagtttctccaacatggtcttggctccctttagtcatggcttccccctctctacaactagattccagtagtatggctcagtgtgtagctctgggtgtcttcttctgctttgatcagctacctgatgaaggctataggatggcaaccaaggtagacatcaatctcagtataggggaagggcattaaaggaagtgtctccactattgcctggattcttagttggggtcatccctgtgtatccttgaacttttccctagtgccagacctctctcccaaactatattgactcctctatcaatgtagtgcctttcttgctctcctctattcctccgctgtctctgtcttcctgatccctcttgctctccttccccatcctcttctccacttctatttttccgacctgcctcttgtctccccccatgctcccaatttgctcaaggtatgtttttgctttcccctctttcagggactgtgtatttttattggggggtcctccttatttcctagtttctctgatggtgtggattgtagacaggtagtctttggctctttgactaatatccatatatgagtgagtacataccatgcttgtctttctgtgattgggttacctcactcagggtgttttgttcccattccatctatctcctgtgaatttcaagatttcattgttgttttttttttctggtgagcaatactctattgtataaatatagcacattttctccatccattcattgcttgaggagcatttaggttacttccaggttctggctattgcaaacaaggctgctatgaacatatatccttgttgtgtaattgtgcatatttgggtatatgctcaaaagtacagttgctggatcttgaggtagactgattcccattttcctgagaaaatgccatacttgtttccaaagtggtcatacatctttgaattcccatcagcaatggaggagtgatactttttccccacaccctttccagaagagaccttcattggtgtttttgattttagccattctgaccagtgtaagatggtatcacagagttgttttgagttgcatttcctgtatggctaaggatgttaagcactttcttgtgccttttagccattttagattcctctatggagaaatctctatatagttctgtatcacacttttaaattggagtatatggtgttttggtggctatcttcttgggttttttgtatattttggaaatcaatcctctttcagatgtggggttgaatatcttttcccattctgtgggctgcctttttgtcttgttgactgtgtcctttgtcttacaaaagcttttcagtttcaggaggtcccatttattaattgtccacctcatgtctgtgctactgtgctactgtttttatattcaggaagcggcctaatgtacaaaatttttcaagggtactcccccacactttctctactaagaggttcagtgtggctggatgtattttgagttctttgatccatgtggacgtaagatttgtgcatggcataaatatggatctatctcagtcttctacatgtcagcatccagccttgccagcaccatttgttgaagaggcttccttttaatttccattgtaaaacttcagattctttctcaaagatcaggtgtatgtaggtatgtgggttaatatcagggttttcaaagtgattccattggtctctctgtctattttgatgccaataccaagatgttttcaggactatagctctacaatagagcttgaagtcagggacagtgatgcctccggaaattcctttattgttcagggttgttttggctatcctgggtcttttctttttacatataaagtttagtattgttctttaaaggtctgtgaaaaattgtgttgggatttttatggggattgcattgaatctgtagattgcttttagcgagattgtcatttttactatgttgatactacctatccaagatcatggaagatctttccattttctggtaccttctttaatttctttctataaagattcaaagttcttgctaaagaagtatttcacttctttgtttagcattaccccaagatattttctgttgtttgtagctattgtaaagggtgatgtttctctgatttctttctcagtccatttatagtctgtatatagtagggccattgattttttttttttgagttaatcttgtatcctgccacattgctaaagatgtttgtcagctgtaggagttccatggtagattatttcaggtcacttgtgtaaactatcatgtcatctgcaaatagtgaaagtttgacttcttcctttccaatttgtatcctcttgatccccttttgttgtcttattgctctagctagaacttccagtacaatattgaagaaatactgagggattggacagccttgtcttgttcctgattttggaggaatcatgttgagttcctctccatatagtttgatcatggctgttggtttgctatatattgcttttattgtgtttatttatgttcctgttactcctgatctctccaaaacctttaacctgaaggtgtgttgtattttgccaaaggctttttcagcatctagtgagatgatcatgtggttttaattttgcagtttgtttatatggtggattatattgatggatttttgtatgttgtaccatccctgcatccctgggaaaaagcctacttgatcatagtggatgacttttctgatgtattcttggattcaatttgccagtattttgttgagtactttttcatcaatgttcatgaggtatattggtctgtagttctctttcttagttgtgtctttctgtgacttggttaccaaagtaattgtagcctagtaaaaagagtatggcaatgacccttctgtatctattgtgtggatcagtttaaggggtattggtaatagctcttctttgaatttctggtagaattctgcactgaaaccatctggccctaggcttgtttttggttgggagacatttgatgactgcttctatttcattaggggttataggtctatttaaattgctatatgttttgatttaatttgctaaatgatatctatccagaaaattgtccatttcctttagatttttgaattttttgaaatacaagatttcaaagtatgacctgatgtttctctggatttcctctttgtctgttgttatgtccccctttttatttctgattgtgttaattaccatgctctctctgccttttggttagtttgggtaaacatttatctatcttgttgatttctcaaagaaccaattccgtgttacattgattctttctattgttttctttgtttctaattgatagatttctgtcctcaatatgattatttcctggtgtctactcctctggtgtgagtttgcttctttttgttctagagccttcacttgtgatgttaattctctagtgtgacaaatctccagttacttcatgtgggttcttagtgctatgaacttttctcttagcactgctttctaagtgtctaataagtttgggtatgttgtgtcttcattctcattgagttctaggaagtacttaatttcttttttatttattcttccttaacccaggaatggtgcaattgtgtgttgttcaatttccatgagtttattggttttctgcaatttgtgttgctgttgaattctaactttaaatcatggtggtccgataagatagagagggttatttcattttttatacatgttgaggtcttcgatgtagcagttattcattcaattgtagagaagttttcatggggtactgaaaagaaggtatattcttttgtatttggatggaatgttctatagatgtctgttaaactcaatttggtcataacttttattagttcctttgtttctttgttaagtttctgtctggtggtcctgtctagtagtgaaagtggggtgttgaagactcccactataagtgtgtgaggttttatgtgtgatttgagctttagtaatgtgtctttaagaatgtgtgttccttcatatttggggcatagatgtacagaattaagacttcatcctgatggacttttcctgtgatgaatatgaaatgaccttctccatatcttttcattaattgtaatgtgaaatctaactcattagatataaggattgctacaccagcttgtttcttgtgtccatttgattggaaactcttgtcctaacctttttctctgaggtaatgtgtgtctttgatattgatatgtgtttcttggaatcagcagaagggtggattatgtctttgtatccattctcttatcctgtgtctttttataggcaagttaagatcattgacaatgagggatattaatgaccattgattgtttattcatgtttgttttggatttggtggtggtggtggtggtattgtgtgtgtattcccactccccctttttctttttgattctggtaaagtgagactatctattgcctatgttttgtgagtttagttatcttccttgggttagagttttctttccaatattttctgtagggctggatttgtggatatgtgttgtttaaatctggttttgtcatggaatatcttgttttctctatctttagtgattgaaaactttgctgggtatactagtctatgatgatgtccatggtctcttagtgtttgtagaacatctatccaggacaattctagcttttagcgtttccattgagaagtcacatgtaattctgatgtctgtctttatatcttacttggcctttttcctttgctgctctttcataggcatatcattctttaatttggggaagttttcttctatgattttgttgaatacgttttccttacccttgagctgtatttcttcactttcttccatacccattattcttaggtttggtcttttcacggtatcccatatttcctggatgtgttgtgttagggatttgttggacttgagattctctttggtcaacgactgtatttcctctgggtcttcacacctgagatgctttcttctatcttttatattctattggttatacttccttctttagatcctgattgtttacccagcttttcaatttccagcatgcctccttctgtgttttattttttctgtttccactttcaagccttgaactgtttcaattgtttccttcacttgtttgcctgttttttcttggctttctttgcattctttaagggatttgtttatttcttgaaattttgtttgtcttttcttccatttcctgtaattttttttgtttttctttcatttctttaagttattttccaatttcctctctgagggtctctattatcttcataaagttgtttttaatgtccttctcttctgctccatgtgccttgggatgttcaggtctgatgtagagttccttgattctggtggtgtcatattggtctttctgttgttgagtgtgttcttatactattgtcttcccatatccttctcctcttgtcttctggtgacataggtgggccaagactttgaggtcttgcaagtctggatggtccggcctccactggttttctcctcactcaagcacagggtatagggggggcaacactcaagtggagggcagagggcagagggtggagtggtggccaagactaaggtgtggtcagacaccaggtagtccatcctgccaggattgctccactacatgccaaggaggcccagggagatccatgaggcaggtagtaggctttttgccccagcagaggccacactcacctcaagcagaggatggagggtggccatgctcctattgtttatatctctctagagctggagttaaaggcacatagccctgggtggccttgacttcagagtaatccatctgccattgtctcttgagtcctaggattaatggcgtgtaccatccctgcctgatctcaacagcttgaggctgaccttattttcggaatcctcaggcaggctttaataaataaattgtaaataatataccaccataattcatgtcaatttttacattttttttttacttttgagaatttcctctgtaagtactgtgtttttatcacttcctccaccacttctccctccagtttctttcacattgccttccacatttatgatttcttctttagatattattgttattcttgttcatatgttcatgtgtttagagctgaccagttcagattagataatatattaaggagctcatttctggggaaagctttttctccctctcttatcagccttgactgtctatagatttttgtctaggggtagtaccttgtgacagagagtcagaacttgtgagaaggaatagaataagtgattgtggaatgcttagaccaaaatagtatagctacatcacccaaaccttgagtcatatcacagaagatgggatggaaaccattccaagattcagaaggccaaaatgcccactgctatatattgtcttgtagacctcacatggtaactgttcccatgaagtctcaacaatgtgattgcctatgcatgacatgcatgacaacacaatattatatttcatacttgcaaagagctgtgttgtattataaatacctgaaatcattgttctcattcttaagaaaatttacctcccatgtttttggtcatttaagagaataaaagagctgcactgctaaatggtgaagaaatctgccaggagagaatgaaatgtacaagagaggaaagaagtactagacaaagttgcagaaatggccctgggtcaaaagaactagaaaaaagaagcaacccattttccaaagctagtgaaatacaggtatcacactgctatgttttattttctgtcagttatttgcagcttttatatcttcctaactatatcatcagcttctcttttctcaaagaggttgactgtcctgtctaagtcaaaaagtatgggataagtgagagacagagagacagagagatagagagacatacagagagagacagagagagaagccatattttaccaacagaaatgcttgtctctagagccatattttatgcaactgttgcattataactggctctgtactctttatgacatgatgttataaaatatgtattagtacattcagttccttttttaaaaataacaccagtagcacagacactgagattgacaattaataagtaggacctctgaaagtgagaatattctgtaaggcaaaggacacagtgaacaagacaaaattgcagcccacagaatgagaaaagatattcactaaccctacatctgacagaaggatgatttccaaaatatacaaagaactcaagaagctagtcaccaaaacaccaaataatccaattaaaaagtgggggtacaaaacagaaatttcaatagaggaacctaaaatggctgaaagacacataagaaagtggttaacatccttagccataagggaaatgcaaatcaaaataactctgagataccatgttgcttctgtgagaatggctaaaatcaaaaccactaaggacagtttatgatggaaaggatgtggagaaaggggaacactcctccactgctggtgggagtgcaaactcatatagccactttggaaatcagtatggctgttccacaggaaaatgggaatcagtctcccacaagatccagcaagagactgtattctgaagatgtggctttattagaaaagcagtctgtctctataacttcacgttgagaaagcaggggtagcacaggggaatttggggaaagtcaaaggaggtcttggaaggagggagatgggatgacttagttaagcaatgagcttgccaaggaaaggaaatgctgttcctgtgattgagctgtattggcagagtgcttgggaatgggcatctgaagacagaatacaacagctgcacattctgtgtgtgcttcattagtatttaggcacttgtactggcctgcctttggagttctgataagagatggcctttcctgctgtgactaagagtacctcttcaatatgttcccatttaaatgggccctgcccacctcccatctctctatctttaattccctccatctctctgtctgtctgtccatccccctctctctccttctcttctctctttcctccctggaggtctgtctccccacaccccttttccctttttatgattcctttacctaaataataattaaaaaactgtccacttgaagtctgttgcatgcagtcttcctctctgaagacactttttaaaaattacaatatgcttgattctgtaattgtgatatttttacattttaatcatatgctgtaagcatacaattgttacaataataaaacccagatgaacaattacctaatcaagtctctcttagtcacatctcaatctgtaccttgttgtacttactaggtttagaaaccaatagcctatatttcctctttctcttccacctattgggcaattaatcaatattaatataattcatgcaaatacacacatgaatatttttaaataatttcttctaatgccaacaatgtgaactcttttctgtgaatgtttgagaatttgagtatctgaaatattaacaaaaatagccaaaagcaaagagctgataaatatgtttagttttaacttaaatcttattttctacaaattgtaaaattgattttattctgctgagagaattaccagagtacaatttgttcaactacattaaagtaataattcaatcgctatttgagaaacttctctgcacagagctctgtggcaagggctatttggaggggaatattctttctattctgtgaggcaaaggggctctgtgaaagtaaaacatgccaaagtgtgcacatctttagttactgtcaccaagattataacaaagatacactgacaattcgcccagcaaccatctctgttgaaagaaagtcaaggatacagaagaatagttggtttgcttataaagcaacagcaagatattgacagagaataagtaatcatgcatataaggacaacaaaccaatcagagaattgacaactttgagcacatggccaagaaggtggtggccatgacgacttgacaggggaggcagtggtgttcttagaaattagagggagtaaagagtgatctaatgcccagtgacggaataggtgactttcattaagaacaatattttatgtttatattttgtcttctttttaatttcaaatttcaccatgaaaagtttttaatatcaagcaactaaacatccctgcagaactcaaaactttaaattttgaggagaaagtatatcttgatatctctactagcttaactaagaaaagatctctgaaatacacctgagaaacaaaggtcaactttacctggtaagaactttaccacctatttcaccgaagatattagctttctttcggcttcattgacattggctttcatagacttgctcaaatacccaagcacacacagatacacagagaaacacagagacacatatagacacacacacacacacacacacacacacacacacacacacacacacaaacgtacactcacagagagaggacagagagacagacacagacacacaaacacatgcatataagcacatatagacaccctgacagacatacatgcacatgcacatacacacatatatgcatacataaacaatatacatatatagatatatgtatatatacatacatacacacagtaaaaaaacgtgtgcgtgcacacacacgcacatgcacatgcacacgtacacacacacacaaacacacacacacacacacacacacgccaacttgtacacagttatacctcgggacttttcctctgcctctaactttttccagaaatcctgtcccctgagttatccccatgcttaaagtttctttgtagtctttggtcaaacctcaacattccatgttgccctttatgaagcctcagccttagaaacattacattagaaatcttgttttgtctacttttaatttttcattgtagtatatacaggttcctcacatatgtgataacttatttgtagtatatactcttatatttcagtctgtctcttgctataatataaactccaagacagcaaagatctgtgaattttcattctgtcaatcttgtgagtattaaaatcaacaaaattttcaagtggagttaattgatgtctcctattcactctgtgtttgtttgctcttatttaataaatcaacaatgacacctacaaacaaacattgctgcgtatgtttaaaatgcttcttagattcatgcatgtagttagcttggatgcattttgtgtgtggagtgagggaatgatgtatgttttcttcattgactctcatttgtattgagaaaattatatttttagtatttagtgaaactgcagtccaggttgtagttgggaattcttggaactgagctcaatttctctggaagagcatcctgtgctcttaagctctgagcgctctctgtaatcctagacatttagcctcagctgggacatcttccattgatgcagtttcattaatgcaattaatggcaccttttcattctccacttacccaccctatccaccttttatttgatgtaacacatgtgagttgttaaatccatttatttctgtctcagtttccattcttgagtgaatgtttgatgataagagcatgaattatttcttcatccttactcagttaatctgcccttttttcaaattatcctcttgtgctggtccatatcctttaaaaacatcatttctattaataacttatccatctttgtaattaattagtattttggtaaatgactgtatcagctaatgaaagacctctcaagacaagtatggccaccattctcccttacaataaaaccttgtggaaaatcaaaatttacatttcaagatctatttgctttcatattgtgagatacatttttcaagatgaattttgtttggaacagggctttggggaaagatttccctccaaatgacggaaatgtcaaatggaaattttcattatgtctgccatcatcttatccaggaatctcagaacagtttattaatggaagctgtagattttcctagtgtgccctttggggtgatttgattctatcagaaggatatggcatatataaactttcagacatttcctttgaggagctttaaaactaagctttcatgaaaataattttaaagtccatgggtatgacttcatggttgcagcaccttgcaattccaatattgttaatgcattatcattgagcttaatactcactgcaacaggagaaataagtgaatagaagaaatttatctagatatataaagaattttacaataaaattcaatgttgcaaaacagttttcatgaatagtagcagctttgggacaattaaacagtattttaggtaactgttttaaacaaatccacagtatttagtgaagttcttgtagtttttaaagtttcagagtatcaatatatagcattacttcagcagcccctctctcattctctctatcttcccttataccttgctccctccctctctcttagaatttctccagcacttctatccagcataatgttctaatgagactgatccaggtaccatccctgactaggttaaccagtgaggaaaagacagctgccagtgtgagttaaaaatattttctcactttccatgtgggggttctggaaaagcacattcaacacaaggtcagcaaaaacacttctgaggttcacagttcattggggaaatcagcagaagggctggctgcagctggaacatatgcaaattatcttggcatcagttgcagtttctgccatggggtatctctgggttgcctctattaaaaatgcatcaggttcaagcactcacctttaccttgtgtacccagaaggccactccagggattcagaggagaccgtgtcaaggataatgagagggcacctgggaaggagcacctcatcaggacttgtgttctgttcaatagtgatgcccagggtgttggttatttcttttcttagatgccacatacccttacagtaattatgaacaacatgctttttatcatgttactgagatacaccttcccaaactaaatttatctgctctgtagagtatcttggattatctgtctgtctgtctgtctgtctgtctatctatctatctatttatctatctatctggagttatctggagtcattcatttattttgggtacttgaattctgataaatttacaaaaattcatgtaaaatgaattgataaactgtatataaaagcacctcagaggcctttctattttgaggactgcaaatattaagcacatgtttaaaacaaaatgagaggatgaaactgtttatgttctttgtagtaagacagctgtataaaaaattggtttctccaagtatttatccctagtgcatgaatgggctttgggagcctatcccctatgtaaggatattctcttagcctagatacatggcagaaggctttggtactaacccaaatgatgtgacagactttgatgagcccccataggaggcctcaccctccctgaggagtggataggtgtcagatggggtttgtaggggaaaatgggaggacaggagggagagggaactgggattgttatgtaaaataaggtttttttaatttaaataaaaattaataaaacttggtttctcaatacagcagcctaggtttatggatgctaaataatctagtttgtccccgtactgttggttttcatcatttgttggagagaaaggaatccaacaatgaaataaaagaaaactagtaaacttctaagcattggtgatttccataggatgattccacaaagtaagcaccaaatgtcctgacaaaatgatgtatgattttccgcatcataaaatgctttatttttatcaccatgcaatgaagaaggtgtccaattagggctctgaaggaattaagtttatacaaacagtatctctaagtacagcagaaagcaaacctagttttataacatactgaccagatccagcacagttccaattcagtgtgcacagtggctggaaatggcataggctcttgccagatcttggctgccgtgttgtattgtgatgaagctgacttcgtcctatgtgtttccacacatagaaattcatcgaatacaaactcttgtctctaattgaacagctattgtatgcctttcccttaattttttttttttgctttttgtcaatttatggagtgtatcagtagtatgtaaatgcatccctgttattgtatgtatacagtgttggtgtgtgtgtaccttgctgggctgagtgcccagaagaatcttcagtttcttagacatccagatgatagaccaggtaaccagtgaacttagatactgtgaccgcagccatgagagctctctgtacagggtcaagcactgcagctccttcatgtcactgatggcaatggagtgtcccaaaacacactaacaaaaccactgcttgaaatatctcacccatatgaacctttccccattctagtcataaattttcttacctctctaaatttagctaaacaaaatgcccagattctaaagagatatttagtaacacgctgcatctcattttaagagctaggtcacctttgtcatggggaaagttccagaaaattgtgtcacttttcaggtggacccagatgggcactgtgtccatgttcaagggttccatgctatttttggccagcaacaatgaagtaattcccctaggtaagaacttcagggtcttcatccctttctgtaacatatggtttttgttttggccttatgatgttctgtggcgtaagctttttcacaggctactatgggtaattttatagcagagtgggggggtagttaggtcactgagtttgccccaattatgtctcagaaagagtatgccatctgtgcaaactatgaaaggatgctattgaaatctgtggcttttcattctactatcacatggtttcatgctgggatgtatatgctgaagtaagagtgtgcttagctctacagattttggcaagatacattcagaaacatttacagtaaactggaatgtgtgttgaaatcagagacaggtaatgaaatgagaagttattgcaaacagcgcatgtaatacccaagtaatttgagggaataaaagttcggtgcttctcaatgtttacaacacaaacatgattgacatggatgtttattcttcttctttagtgtttggtttgatccaaccctaacatgaacttccataccaatttttcttccattatgtttaataaatacattccaatatgttgtaaatagtgtgttgtttatttttgtacttagataacatatatccaaatgttgtctttttcttcatatattccaaagatatttcatgatttttcttctctgtgtctttctagcatgcatacaatgagggagagagaagtggagggagataaggaaagatgagactctggaaaggaatgcagtgacaaagggtaggctttatgcttcgtggtgtaaagggcagagtttgctttagtgactcaataggaaactagcaaatgaatgtatagaaaactataggttgataagatacaaataggctaaaggtatataatgttctagacccatagttcctacttcatactgagtataaacacactgatgttgccttgtatgatctatgatagccatgcatttagttttgaatcagtgaatgcattatgtctgtagcaagccataataaaagaataaatcgcaagagactgttgaaagtatataagtaatagatatatgacaggtagatacatagatacagaatagatagctggtagacagagaggaataaaggtagatgatagataaatagatgataaattatagagatagatagatagatagatagatagagaagcagataacaaaaaagcatcatctgtattgtctaattgcatgctcacaacatccagtagaaaccaacagaagaagcacttttaaagtagcctcctggagggctggagagatggctcagtggttaagagcactgactgctcttccagaggtcctgagttcaattcccagtaaccacatggtggctcacaaaaaaccgttataagatctggtgccctcttctggtgtgcagatgtacatggaagcagaatattgtatacataataaataaataaataaaatttttaagaaaaaaaagtagcctcctggagggctggagagatggctcagtggttaagagcactgactgctcttccagaggtcctgagttcaattcccagtaaccacatggtggctcacaaaaaaccgttataagatctggtgccctcttctggtgtgcagatgtacatggaagcagaatattgtatacataataaataaataaataaaatttttaagaaaaaaaagtagcctcctggactcccaatctagaaagtccagagcagagcaaaacatcgccttcagtatgacttccaagtaaatgtacaaataactacggaaaggtgatatcatcaaattgagggcttaaaacatccagtagaaaactgagggctctctggctggctgccttggtgaggtttcctcagttggtttctaatggatgttttaagcattcggtttgatgatgtcacctttctgcagtgtattgtgttgttgttcatttacatggaagccttacccaaagggatcttttgctctgctatggattttctagattgggaagtccagaagggtactaaagggacttctgttgatttcttctggatattgtgagtaacccaattagatgacccttttgtgttacctgcttatctacctacctacctacctacctacctacctaactacctatatcttccatttatgtgtctattatctacctttctttctgtctgtctatcagctatctatcctgtatctatatatctgcctatcatatatctgtcactcatctatcatctatctatctcttcctggtagagagtcttaggtgagcagagtgtctccttagataatgcttcaaactagaaaaacagataccaacacagagaaataaaatcattaaactggattcccacaacatttagcagagcccttctatggaggttgaggcagtcagctggggtttctttcaaacattctctacatggatgagcttcatatggctaaccttctggcttttccttctcactaaaggagtttttatatcatgggtttaacaataggaatctctgttggaaatgctccatcttcttgctgttcacaaggagacagtgtttttgttttggggctcttttgctgttttagagagtattggagtacatcacatacacaatttgaagaaaaaaataaatacaatttttaaagcttcaatacttttggttttatattttactgagacaaagattaggtctcttctatttagcattgtaaaaatgtccactttctttttagatcatatgtggcatttgccctatgtgtctatttctataaaacaaattcatttcatgaaaagaatgtaggctttagagacagacatccataattcaaaattaatctgctacttaagtgtgtggctctgggcaaatgttctcatcacccaaagttttattttccccatttctaaaataaaaataatagcaattaatttccaatgataattataataattcaatagaacaatagcaaaggcctcctcaaatagaggtttgtgggtgtaaaacactggtaaatttggctattattatgaacaagaatactaatagacatagcctaggccagatcagatataattttttttaaaaaacatatgaataaacaaaagtctcaaccctgtcaaatatgtgtcctacaaggatgttaaagttgactggctgagaggttcaaatagtaaaatacatgaaaaagacacaaatgctcaactccagcaaatacatgaaggttggaaaacagctgacaggaaattcatagcaataccctgtttttaagttaattacttatctattttctttatgttccttactgaatagtctctggtgtgtatgtttttctgagataattgaaattcttacaggtcacttattttgaattttgatgtggtactatcacataaattatgttattatttttattactatatagtatttttatttttggtgtgaatgtcaatgaccatggtgtaagtcatctgtttcactaaaaccctgacagggagcacttgaatatttggatatcatttagaaattctgagtgtcattgttgagggttcagccaacatggtgtaatggccaagaaggaagggctattagcnnnnnnnnnnnnnnnnnnnnnnnnnnnnnnnnnnnnnnnnnngagaaatgagagccatcagggtgaaagtgcagcaggagctcataagaaatttatctagatatttgaaatgctctttggctctagacacatgttatagttacttcagactttttgtcatctgattcattttaaaccatgactattgtaactgtaatattgaatgcattgtaatacacatagaaattaatgctacaatttttcataattttatgactttgatatcttaaaatttagcattccctatgtcatgacaatgtgtttaccacagcaaatctattttaaatcaattttgatagaactgaactcaaacaattgacagaaagggcaatagagtaagatatattataattttttggaaacaaaactagtagaaaggtgtagggagctgcagaaaaccgcacccaaaagatggcgccggtttccgccctccgccagcccgacggcgagcgctctctgtggtaaacaactccaaatttggtaaaggtcatgtatcctcttaattctgcttggagacaacctatcctgacgtgccacgtagggttaggtgattggtagatgtagactatatcaggccccgtctccctcgacccggggccgccgccattatacattgtacaaagcaaagaggttcccgattaaactgtgtttgaagaagattcctcggtgtggcgtctttcttgctggtcaagggtggacgccgcagaaaggtttgtgtcaaatagctgtgaaaggagtactgtgtgggttctggtcagggacaattgcacatcttgagtttaccattcagactctcttatcttcaaatatcaatgttctatgactgattcattgtatatgaaatgttcatttctttacaactatcgtagttattattattctgtgtctgggcacaggtaccacagagggcttgtggatgggaggacaatgtgagagacctggttctttgctgtcacattttgatcccaaagatagaaatcaggtcattgatcttgtgtggcaagtacttatatgtgagatcatcttgctggcactgaaatattaatttactctcagtatctggttgtaccttgtccaacaggagtttgaagtcaatggtccctcattcatatactcaacacttttcagaatgaacttctgtataaattaggaattgttgctgtaactagagatgcagaagcactgcctcaagggaaattatgattaaaatatgtacatatacaatgaattgtgacagaatgcttacattcttaatattgttgttaaatgtgctgtaacaacagagggtccaagagatctataagggttccagagacaaaggggcattcaaatttaaatgaaaattgagccaaaatatttcttttcttctgattctatatttagtcgcagaaaaacaaacttaacaatgtgaaacatgaatcaagctggttcatatctccaggaaacttaagtgcttagaaatttaaaaactagtaatatgaatcataaaagatgtgtttgtgatcaataggtctttttcccattgttcgtgattattgttttagttaaacatatttggatgacctttcatatagatgacatactaaaaaagggataaaagtggtgagacagactgagatacaagctgagcttctagaaaatgtgaaaaggaatatttttgagaaaagttttacttctgcagtgtagctgtttctcatacatgcatccttgcaattcaaaacctctgcagggatctggaaatcatagttgaccttgtgatttcaaagataattgttgatgacttagtgtcagcctttgttaggaaagattcttctcagaaatggaggaattgtgaaacacaggcttccaggttttcttctctgcatcccgagaaatagtgaggactgttgtcctcagtgtgtgtgtcctggtgttcatgcttctgttattgggaagtaatgaagagaatctatgagattctggcgctgtgaacatattacatggaagccaataaataccaagttaaatgctttcatttttcttgatgagtgaagatctgctctcccacatgatctcaggaggggtgtgcttcctaatcaaatagtcttaccgtgttctctatttctgcttttgattaagactatcagcccatcttagtcagtattccattgttgcgaagagacgcaatgaccatgggaactcttataacagaaaacatttaattgtgggcatgcttacagtttcagaggtttagtccattatcagtagagtgtggagcatggccatgtgcaggaatacatggtgctggaaaagtagctgaaggttctacatctgaatccaaaggcagcaggaagacagagacactggcactgacttgggctttgaaactcaaaacccagcctaaagtcacacaattcctgcaacagggcaacatctacttcaacaaagtcatacctcctaatccctcccaggtggtgccactccttgatgactaagcattccaatatatgagcctatagggcattcttattcaaaccaccccatagccttcctaccatttctcagatgcctctggcttctgtttatagatgcctaaatctaacatgagaaaattggggtgtccagcttcctgcattagtccactaatacctcttgtcgttttgactaacattttttactattttttatttttaattactcatatttgcacaccaatgggatttgctgaaggaggcagaggtaggaggatcatgaggtcaacgccagcctgggctacactaatacctcttaacccaaataaatgacatactgactatgacttttggtttacttgaaaaatgtggatacaatgatagtgccatctggcttccttctctgatggatgcaaggattaaaactgacagtccagaagtctcttctgtgcatccttccagtacctgctatttctataaataaaccacaagtcaacaattatcattatagactaataatccccaattgattctaatcacataacagtttacaatacttttgtgatgcttctgttttgcttttagcaaatatttttatgaagtggttattttcttgatttaagttgtaattgttttatataattttaaataattggcacaaaggttgatataataagatgtcataatttttaaaaataaaactattggacaagtttttgtgaaaaatttgacagatgtttatatttcctggcaatctgagggtaaataatgtttctcttggagatttcaaatttcatatcattcccataatattttgggatctcattcttctatcaggaattagaaccttgcaggctctgtctttggattgataaaattttgtaagggaaatgtccagctcagttgccctctgatgttgttactgactggctacataacatattatttataaactgtttggccgatggctagggcttcttactggctagttttctcttaaattttaacccatttatgttaaactatgtattgccacaaggctgtgtcttacccataatctagcatgttactccttgggcagcatgacgtctcttccatttatgtgtctattatctacctttctttctgtctgtctatcagctatctatcctgtatctatatatctgcctatcatatatctgtcactcatctatcatctatctatctcttcctggtagagagtcttaggtgagcagagtgtctccttagataatgcttcaaactagaaaaacagataccaacacagagaaataaaatcattaaactggattcccacaacatttagcagagcccttctatggaggttgaggcagtcagctggggtttctttcaaacattctctacatggatgagcttcatatggctaaccttctggcttttccttctcactaaaggagtttttatatcatgggtttaacaataggaatctctgttggaaatgctccatcttcttgctgttcaccattaccaacatcaccacaggtgagagagagaaggacgttaccaacatcaccacaggtgaattatcaaaaattccaaaactccaataacacagatttttttctcattctttcttctattagaacatttaagtgtatctgtatgctgtgaaattatagttagtggatggtttgttctgtgtctgaggtttctatgttcttcccacagtatggaaaatttatattggcatatcctgctcaattattttccctcaaccatgctcacactaataatgaacatctcaaagacattcattggtttttgtttacagttgtctttacctatggtgtatcctttgatgcttaaataacacaccccctcctgcatgctgttcacttttcctatatagatcttagtatattaatcatactacttagactccctgcctgatatttacaacacttgtatcataagtaaaccattatttggtatgcttttctctacaaagtgtgttcctattttaccttttcagatcctcccttgaaatatagacataatgtgcaaattctacaaatagcccaagtgtaaggatgcatgttatttgaggtattgtgaaaatgacaatttaaagttgtagacttgtttaatgattgctgtcaatgcaacttcagcacctttgttttggatcacagctgatttctggtctttcttcagaattctaactgaagtaatagatcttgtagttctttgtctgggatgtattgttagcatccagagaatttagatgtggagggatagtgtgaacaagaaaaggcttgtcttagttagggttactattgctgttatgaaacaccaggaatcaaaagcaaccttacattgcaccttggattgcagttcattgccgatagccaaggcagaaacccaaacttggcagaagagctgaggtttggcactgtgagagaccaaaagaggtcattaatgaaggtgcagactgagtagcagtataagctccaggattgaaaagaacatagagagaagttggagcttggtatcatggaaagaatccagtaaaggctattggtaaaagcacagctcagttgcagcaggaaatgccagtgccatgggatgtccttcaagatcaacaacagtggtagagtggagctggcttaagcttggaagacaagctgtgtgttctacagaggtcagagccagttaagtgaccccagccctttggaagagaccagaaaatcttgagtaaattccagcctttggaattttgttatttactcttggttttgttctgttcagatggtgatttactctagttcttccttttgaagtatgaaagtgttcaaaatatttttaattgtacaggatcccatgtctgagagaatttgaacattttaagtggttttatatttttaaagagactctggatttttaaagaaaataaataaaaggcagtgtttgtgacagagtgtgggatattttatgtttgtacaatgttttatattatgattttggtattaatgtgttatcttgataatgaacaagaaagaaaaggttgtggcttatttgtgacaagcatttcattatgctggcaagttttatgtcaatttgacacaagctaatgtcatcacagaggagaaaacctcagttgagataatgtctttataagatcaggctgtaccaagcctgtaggacattttttaaattagtgattgatggggagatcacatcctttggtgagtggtgccacccttgggatggtggccctaggtgctacaagaaaatgggtgagcaaaccatgaagaacaagtcagtaagctttattccttcatgcatttaataccactgtcacctgggagaattttatacattaccaagtttggctgcaagcacaaatccagtgtagccaccagtggaaaacagcatttgtgtcctgattctaaggaaacacctccaaaaagatttcatctcagtgattctcatctctccttgaacacccctaaattctccaactgaccagatcgagtgtcccagcaaaacaaaggctttaccatagtgattcatgtatcttgatagttgcagcagattcttcagccccagctaagcaaaaccacagatttttaacttaagatatgaaaatactcaaaggagtctttaactctacaaagtccttgcacaatcctgcacaaaacaatttaaaaaggcaggaacttacacagggcagcaattcaaacaggagccaggagctgatccagagtttttggcagggtgctgcttactggcttactccccatggtttgctctacctgctttcttatagaacccaggaccaccagtccaacggtggcaccacccacaattaactggatgcttccccatcaatcactaattaagacaatgccctacagctggatctatggagcatgtttctcaattgaggctccctgctttcagatatcttgtgccagtttgatacaaagttaaccagcacattaaccagttcaatgaatcttatcactaaaccaaatagtagagatcttgtatccaagggatgggcagactcacgtgtatctaatctcttgctacatctatttgtcagagcaaatatattcaagttcctccagatggataaataccatgcactctgaggcagtgaggtaataaagaatcttattacccagaagtgaagggattgaaatctaggaaacaaatgttcaaagtggtagttttacctcacacctggctcggccctccaatagagctctgtgggtttttttttgggggggggtatgagtgggtttgctaactatacaagattcctgaaagagaaagtcacaaaatttctagggaaccctgacaactgtgactactggagttttatattgtcatgctccgccattcttctctggcatttcgagttatcctaccagcattggctctagcagctttggctctattatgtcacacattccccaaaccagtgtctcctctagtccacactttttcctgattgtgtgtattcttcaaaccacagcttcactaggctttccttgtatcttgtgcttttcttcatcaaagggtaaaatggtaagtactaggttagttgcacaccagagatctagttgccttttgaatttggtcattatttccctcatatgcctgtcagcatttcaaggctttagaaaatggaggtatcttggaaatgaaagaactaagcaagagttgccaaaggccttgttgactatgcagtggtatgcagtaaacaataggtatgatagaaatgtatagacaaattaacggcagtttatctgggagatgattttaaagatgtgaaagacatttgtcaaatgaagaaagaggttttctaaaagaggctgtgtgctttgatgagccatgagtgctgaatggaacagataacttggaggcttcagttcttgggtttctctgatgatgatacagttcatgtaatctgaaaacattacaatagaaacaggatatgctgtgagtgctggacagaggagaaagattgtctctactcctctaagttctgtgtctgagctacaagtgatatcatcaccaaactaacagggaaagtacatttttattacaggactctcacaaaagtttatggctgaaagtagcatgaaaaataagacagggagtttgatcttggggttcaagcttcaagctgaagatcagaaaagcaaagcaccaactcttatctctacctcagaatgaaaggcgatcctggctccaccaaacctcagactgcaatcatagactgtgatgctttccccaacatggctggagaatcctgagactgagtctactgaagagcctgctcctatcttttatacctctctagtgctgggatgaactgtgtgtgataccaactgctaatatcatctttgtgtgagccgtttctcttagcactggatcaattttatgaagtcagtgtggccttgaactaacaaagatctgacacctcttaatcctatgtcctgggatgaaatgtgtgtgactggattctatgtcttgtggctgactttgctttctgaatcctcaggcaagctttaataaatcataaataatacatgtccacaactgaaagcaaagccaagttgctgaagctttaacagtacctggaactgttcaaatgagaaaggttattggactcctcaatgactgcaagatgagggtgaacaatatttggtgaaggaaggtcacatgatgcagggaagctcggcgtgctaagtagtttctaagcatccctctctcagatacaaatcctttcacaagcaaaggttctttattaatgtaaattttttctttaagaggacagttctgtagagctgtgctgcactgtattaaatgagcaccttgaagtaaacagaatctcagaggactacttgaaatggcatattttcgccgctgataatttcaaggtgatgtatcttgagccattgtacaaaatttgcttttgaaatatgtccttggagggtacggacacttgcatgaactttgtgtgtggcttttaaagtcatactttgtcatctgggttgagtttcatgaaactagacaggtgaattgtctggttctacaaaagctttgtgattgtgttacctcacaatagccaggtatgttagaaggaacataaggttttactgagagtcacctgggttaatgtacaaatggccactagcttattgtctaaatttaacataattcctatctaggccctgtgttcttcctctgtgatgggattatgttagtgatggtgctatatcgtgcctccctaacaccatattcaataatatctggaaaataatgtaaggataccaaaccactaagtctctctcctagataaagcacctttcagcatcaccatctcaatgtctcctgtgtcttctgtttcccgctacatattgacttaatgtgacatattatgtggctgtgtctttgcattttaggcttgcttacatgttgtcacccaagtactacagtccttcagatcacatcttctcttgatgtcattaaacattatttttcaacaactgtttttcatagtgctattttgttggctcactgtagtacaccttgacactgtgtttaatgtctgccttccttaccagtataagacactgaaattcaagagttatgtcaatatacatattggtcactcaaggcaccattctcatgcaagttgggcgtcaccctacagtctccctatgtctttctggggaacacttatctctccactatttacaaagaaaaattaaccttgttttcatgcatttaaccaggctagacaaacatatctaggtcctcatgttctattatgtctatggctgagtctaagatatacttagggattatgactttaagctcgtcaagacaaagattttccagcaccttgtagagtggggaatagcaatgtcacactgagtaactgagtaactgtgatctatcgtgcctaagtcttttatttggacatggctgatgctttagttaactaagccaactcagctggccggcgctttaatatattagtttaatttgcttactgtggttacctgaagttcctctggcagcaatgacagctgataatatttacaaaagtgcattacatcttgctttaatatgtagtggagtgtaactcactcacaaaggacctataatcctgactgaaggattcagaaacatcagtatttcatggttgaactctttccttagcttttctgcatgaaaactaaaaaataatgtagatttatataaatgtgaaaacttattatccctattatagtcacttggatcaaataaacattagttttacaacgaaataaacaataaattaatctgtgcttaactcaagtacagaaattttttattacaagaaacacaggtgagagagtccaccagacttgaattgaaaaattagtcaatgcttagtaatattatttttagacataattcttaagtagcagaaatatagaggaggaaactgttaaggttaaacatcaataggcactctatgtggtaagattcacttcatgaattgttttcttaatgttatctctaaagacaaattcattccaagatctgggatcacctaattgtagaaatttcaaatgagacacagtaaatgaattcctatggcttccagattcatttgtagaacacattattgagagaagtttgtcatacaaagaattgctgatagaaagccaaagcttacactttttacttggacaggaaaatcattaacagaagttgtcagaattcagaaaaatagaaagtatgtattgaacagatacagtatgagttgagactacatgaatgtggaatcttgcatggaaattataattcatgtacgatgttgagaaggcacagcttcttcataggtgggttctcacagtgctctctttagagaaataaagatcattatataatatcatgatttgaaattccttaaagttaagaaaattaggacagtgaggttcctaaatacaggcatgagaacgacattcagcacaggtaatgcaggaatagctgtgaaagaatagtgagctgttaagtgcagaaggcagggaatccagagagatgctccagggatatgaagagggtcctactggtacttccatttggcatatggaaacttcaactctatgttgttggagaaagaagcagcctcacataagacaagctacatgaggttatatgaggatacgatgagaccatgtttcccacagagccaaaaatgttcatgaatcacaaagtatttatcaaagtgttcagcaaggtttagtcagtgagaaacatgactactagccaaagacttggagctatccatgtaatgctttgaagaaatatcaacaaacaaacaaatctctgggaagtccacctggtttaattagatatcaaaataaaacacaatgttttgtgatatatgtgttttggaatgtgtgtgcaggttgaagaacatatttggggagtctgttctctcctttgacccttatgaaggcttcaggaactgaactctgaacatcaagcttcttcaggaaatggcattacccattgagcatctgactctcagtcattcttgctccagtaatgatatgggcaagaaaacaaaataaccttctagggagatggttcagtggctaaactgcttgaaatgaaagcataaagacccaacttcatgtccagaacccaagttaacagcaaatttccaagtttcttcagggataagagaggcacagtaagaaaaatcccaggaatcctgcaagccaggaaacctggcatagacagaagaaaataatacctattcaggcaactttcattatactcagtggattacaaacaaaaatatgacatggaagtaggagtggaacttatgggaagaaaacgggattcagtaagaaagggagagaaatgagtaagaggagagaggggagaaaaaagagtaaattcatcatacacagatatgagaaatccaaagaatgagtgtaaaattggaaaaaagtataaggcaaagatgtatgtttgttctctgatctcctcatgcttaccacagtgtacacatgtattcatacacacacaaaacatactagcatacacacatttattaacacagcacacacacatacacacacataaacacacctacacaaatgaaaattgcttagggacacaaccaccaactgaaagaagactgaaatataactgtaaaatcacctgtattcaatgatgtatataggaggatataagataaaaagtgagacaaactatacacaatagggagacatgtagttactaatttccaaagtaaatataattatttaacatagaaaagtaagtgatggtcagaagaccttcaaagatcaatatgtagaaataaaggcaaggagataaaacaaatgagaaaactgacatcaagaaaataagttagtaaatctggtctgagcaaaaggcaaagaaaaaggcagaagtactcctacagggaaaaatctttaaagagaaaatacaatagaatacaacattaaaactgcaattttaaaaatggttccagggccagatggtggtgatgcatgactttaatcccagcacttgggatgcagaggcaggtggatctctgtgagttcaagtcctgcctgatctacagagtgagttccaggatagccaggggtgttaaatagagaaatcctgtcttgaaaaaccaaataattgaatgaatgaatgaatgaatgaatgaatgaatgaatgaataagcaagctttcagaaaaaaaggctatgggaaatcatactttcattgttaattttcccaaagcttattttcagtacttcctctaaaacatttgtgtctgtcatactgagactctgtcagctcttgccttgtgtgacttgagcatacatgttcaatacaaggcccatccctggttctaatgattgcccacattaagatcaaatgcatttgtatatgtaaatacactttggctaacaaagaggatgaatgaattcccagtgtgttcatgataccagaataagaaacagtttacagaaattatgaaagtaatactagaaaatacacaaacgcactgtggccccagttacagcaggggtatgaatcttcctcccagtattagctagggtttaaggctttgggggcaggctatttttattccagcctgacatttcatgttgggagctagttctagaacaaggaaccagtttttaaacctaatccttaggtacccattactagacacaaacacaagaatctgtgattgaccttctccttcctacttctgagacacaataactaattctgttagaccttgctacactaaatttaacaagtgtacttctcaataagtttctttgttacatttagaagacagtatatagtgatgtctctgagtgatgatctatcttcatggttaaagcatgtatttttttccttgagataaatattgtaagactcaaaactcaaagtcaacaactcataattaaatgctcacatttctccacaaatatattgtatttacatatgccctcattcagttaaaatttttaaagctgattaacaagatttcacaaataagatttttctctcttacttgattgtgctttttgcccaacaactggcttatgaactagcttgtcacacaaaacagtagttgaagtctgagcatagtcccatcactcaatttcatgcacaacaaagtcataaaaatctctcagtacttcataagaaaaacaatatcctcaatccatattttgaaactgctttttaaaattatctttaccaattaagtgcagaggatttcatccatacattaagcagaaaaagcaatacaaatcattgcatttcatttccatcggtccaagtttgtaaccatcactgaaaaattcctctgtacttgctctgattacaaacttttgcctgtaattaaggttctaattgtcatgcagctgtttgtttacaggggtgtctcatggcctctagtggtgcattgcatgtgtgcattttgaagcaaaagcttacatttcccaagtaaatcactgaatagcagctgtatcagaggatggatacagctttaaagaagtcacatctgttccagaagcctatgggattttgcttgctttcttctttcccacatgtgttccaaaaagtgggaatatgctccttgtcaagatttaacagagcaattcaaacagtaacaagaagcaacagctccaggaagaataacatggagtttatgcagagagaaaatggaagaagcagatttcaaatacacaaatcacactactgaatgtttcttagtaatagaggagctgcaaactctgtctctggtgttcagtttgctaaagaacactgagatagtcttcccttgacattcagagaattattaatagtatcataaatgatatcaactcttaataaagcccctttctttcaaacagtccttctaaattctttctaaccttcctaaaagctctgcaagcagtccatgattatttaaccttacaaagggtgagaaaatatgactttttcccagtgagacagaattaataagcgaaagaggcaaagttcaaatatatatgagtgtataaggcaaagacgtttttaaaggcactattagtattctaccaatgtgactgtgaagtgcagtggcttttttgaccttgatgcccccagttcttcagcatcctcttctatgagtccagtactccaccccaccctgttttcttccttcctagccaaaatatattctttgactattctgtccttcttacagtaagtattgatatccctgaaatcctagtggtacctgttttaaccattattctttcaataaaactttcttcagttcccaagaaaccaagtcaatatgtgctcataaaccatgcttattatttttgttaacacaagtatgaatgagtagatacaaaattctctattcagcattaagacattaatccacaatgtgttgtataatcaatattacattacaggggaagctaatgtcatatagtaataaacagcaatctcagtgaacatttgttggaataagacaattataatttgaataacctagtatagaaaggtttcctgttcaattcaataaaaatataaaactagtctagttttgagttagatattagcatttcagctataatatctttttaaatggcaacctaggtctctggcatcttcagtgttagagccagactcttggcccattgacaatttagtccatttcaatctctcaaaaaaatgagtgaaaattccaatttgcatagcatgctaaatttgtatctatcaaagttgttactcaacttttactttctcaaccactgtgtagtagttcggttaccaagtagaagtagaataatggcttaagtcttcctgccaaggcacagacaatacagaccttttgatataatctctttggatttccttgacaggtagaagtgattccaactgtgctttagggaaaagtctgcctgctaaaacatcagcagtgggagattgttccatctcactggaattctattatttagaggataatgctcagacctagaaaaacaaatctgggtgattttgaaatgtcaccattttaaactagctataaactggattccatggagagtattcacataaagtttgaaaaagatgtaacaattgcaacacacacacacacacacacacacacacacacacacacacacacaaacacacaattttctaaggcaagaagaaaaagtcacctgccatttgtcaccatgctgttattgcatcaagtttggagacacaaaaagaagcaactgacaaagatttgagtcaattattataaggactcattcatattgtagagttcaattgttttcatatgctcctttagatatagctgtcttctacagcagtgaaattagtataaaactcacattaacttgttatggtatgagaagaacacacacacacatatctacctctacctttatgtattttaatttttcagctttccctagtctttgtaagaggctagcaatgtcaatttcatataaccaaagaaactaatttctggagtcacatcaagaaagaatcttcccatacaaaagcaagccagtcaacattacatcgtggaagttgtaggatctctcaacccacctcttcctgagaaactacacacagttgatggctgctaaacaaaggtctccttaagggtgtggtccctgttgcattttaccatactccaggggaaggccctgcacatgtgtatgggcagcattaactgtattcattggaatacaacaaacaaaggacatgaatttaggatagtgatgcagggtgaaggtccaaggaggagttagagagactgatgagagtgaaactgatcaaaatatattgtattcatgcatgggaatatctaaggaattaataaaggagtatgttaagtatttgaaaaaataaactaaggtttgtttatgattactttgcattataaattgcttttgcttattcaatggagataattgatcatgcccccctacacacatttcctatgaagaaaatggctaaatactcttaatgttttgtacaaaaaattcatttccactacttgtggaaatcacagccatcattaatagtttcctatgtcaaatgataacatgtatttccctagaaacactggctgatgttatcaagacactacaccttgctctttgattcagtatgtttccacaatacattgtgttatttgttttgctgacaataaccagtcaagaatttgacattatatcactttcaattaagtgtgaaagagtggcagacagaaactccagggaagacacatttgactcagtgtcaatataatgcaccatagttcttatttgagaaaagattagatatgacataaaatcccagacactctcaaatcaaagctgacatgaactgttttcaatacacatcttcatattggtggccagtaagctttgtttttcctcttgtgttgtcactctgtaaaacctcagattggaaagccagactgtgaatttgagcctccccaaaatcctcaatattaaaagaatattctcaactgcaaaataacaaaatatgatttaaaacttctctacttgtacataatgtacctgtaataaggtagaaacatataggatctaaaaataatggggcctaaaatgatgatgatgaagactttggtgaggatggtgacaatggtgatggtggtgaggatagtggtggtggcaaatgtaaaagctttgaggaagagaccaaatttaataagtcattagagaatgaaaaaaaatctgaaaacttgacatttagcaggcacagacctccaggaaatatcaaacacaaagcatgcagatttcttccttttttcaaacatcaacaggatttcaatatgtttaaataggaatcatggtcccctctttggctagatcctgaatacccattgatcctctttgggcaaaacatttgctgaaattatttaatgtttcatctggattttctactattttgtagtttaggaactttcagtttataattttatgtttaaatttcacattcactttagttgttttgtgtaagtgttgttttgttcgaaaatctctttagaaagctatttccaaatacagtatatttttgttattattattaagatagtaaattctggagtactgaaactaaccaaatgtttttgttttagttcaatatcaagtccaccctgttgcagaatatttgctgttttcccttgcctgcctaaggtacctcctttgcctaataaaaagctgaatgaaaaatagcgagggaggagggatagacaagatttatgggcaaggagaataagtagtagggaatttaggctccagggaagaaagataaaggagataacggagatgttaggtgccagacagacaaagaagcaggaaagtaagacatacagaatgcaagaaaggtaagaggccccaaggcaaaatgtaggttaaattaagtttaaaaagtggctgatggaagcagaggcagacacccacagctattcactcacctgaactctggaacccagttgcagagagggaggaatgaaggacaaaggggtctggaccaggctggtgaaacccacagaaacagctgacctgaacaagggggagcacatggaccccagactgatatctgggaggccagcacgggactgatccagacccctgaacgtggatgtcaataaggaggcctcggcactttatggggcccctggtattgaatcagtatttatccctggcataagaagggactttgagagcccatcccacatggagggatgctccctcagcctggaaacataggagagggcttaggccctgcccaggatgatatgacagactttggggaacttccatggagggacttaccctccctggggagcagagaggggatgaggtgggggactggaaagggattgtggggaggggaaggagagtgagaagggattaacgtgaagcaagcttgtttctaaaaaaagaaagaaagaaagaaaaatttagtgggacaagcttaagctcaggctgagcatacataattaataataagtctccatatctttatttgggagctggttggtagctcaaaaaaaaaaaaaaattcccactgcaccatcgccttttctgtgcagctctctgtgtcttgttccatggtcatgcatccccattacagaagtatgcaggacatctaccctgccctagacacacgcctggtgctgtatttgctctgtcctgccctcttccttagagtcgttttggtaaagccgtcattttagagtttccattaactttggcttcccagcatgtcatcagcttcgattcataaagtacatagctgctcagacttttatatttcttaagcaatatgaagttttaagtcccactcatttcttagatggctttgtatctcattccttttacaaagtaacaatacattgtatggatgtttcaggaccttgtgcatggaaggcaattacaacacaactgagcaaatctgtcaccttgacctgcctgcatctggaacagaggtaatcctggccttccagaatgagttgtggtgttttcctggtgattccatggtttggaagtggtattaacacaatgacatgtgccattccctatacatatgtaaccagtcatcagggagtctacctggcttgcttctttatttgggaatctcatatatatattaaaatagcgattttgtacacattttgcctttaggagtttagacttttctgtgaacattttccctgaaattctttcaaagacagtctccattttatttaatacattatattcatggcatggagctgttcatagtttctttcattacaattaattctcttgaaaatagcctaacaatatctttcttttgttgttcttcacattgttttccctttttgttgttcaattccctgtaatttgtcaattgttttgattgctctaaagaagcaatatttagttctactgtggaggttttacttgttaactctttattttattcatagatgtcttaaatgttatcatttctgacattctgctttttagattgaccaactcttcagggtcatgtttctcctgggggatctttgcagcacatgaaatcaacagttaacttattgtaattcctgatctgttttcttacaaatgataaggttaatatgctatagagaccactcagttgtgaagaactcttactgctcctacagaggacttaggctctgtttccaacacccaggatagacagctcagaactgtttattattccagtttcagttcctgacaacctacatctggcctgtgcatatgcgtacatgggcacaatacatataagtaaattattttgataattgctcagtaaaatgattgtaaaataagagcaattctataaatatgaaataattgttccctggctattacaccattggaattgtatagagaattcaataagtaggagtgagaaaatagccaattaaaattgacatcagcatagagtaaaaaaatgttttatgtcaagaatacattgacaatatgaatggtttattcttaatatcttcttttgttagatatctaaaagcctatgttgctctcctctctttctttctctcacacatacaaactaagtagtgattaatgcaagagtgtccagtccattgtgggtggtgtcattcctgtactcttgttttgggttctgtgagatagtagtctgagcaggccaggagaagcaagccagcaagtaggacctctccatggctctgaagcagctcctgcttccaggatcctgccctgtttgagttcctgtcctaacttccttcagtagtgaatggcaatgtggaagtgtaagctgaataaacccttttctgcccaaattgctttatggtcatggtgttttctcacagcaataggacccctaattaagatatagggactttatgatttgatagaaattattaaagaataggatatgtcagagattggataattctattgagtaagaaactagagtatagatattcctctgaaaagtctactggtatttgcagaaggagaaggaaatggacactaaacttgaattgtctgaatagaaaacctgttagaactggagaaacaataaactggataatttgtgaatgacagaatcagtgactacataatactttcaaaattctgtcaggaaaattgaaaatactttctcttactaagttgaaaagtgttccatatagctatgggatgcaaatatgttatcttgaagtgggctagtcaaccaagataacttatctatcattttccttgcttatcagtaatctccataactttggtaaaataacccatattttttagacattttgctttcacagtcagacttcaggggcataaattacgttctttaaatttgatgcagcttgcttaaaaatctcactgttttgaacttatcacaagtgaactgagcttcaataaactgtgtagaacttttggacaagtgttcaaagccatgaatcttttatccttccaaaatcattccatcactgatcctaatatctgatcaactatgcctggagtacaaactccatgcaaaagaaacaactcactagggattattttatgagctctttgtaattgtttagacttgtttactaacatttgccacatacatgtcatactgcttctttaatcaatatttgagaaaataccttacagctgaatctttaaaaggtgtgttctcaactggggctttttctctgatgactcaagcctgtgtcaagttgacacattaaaccagccattacaactggcatgttgtcaacttgacacaaaaacacttcacttttaagccacaacctgctatgaaaagcatacataactttaaaattcccactgtctttaaaaattcaaacacattaaaatttcagtccctttaaaatagccaaccttgttaaaaatccaaacaaagtctttaaaattcaaaacctctcaactgtgggctccagtaaaatattttcttacttcaagagggaaaatcaggccacagtcacaatcaactcaaagcaaaaccaaattctgggatccataaaagatcttctggactcctgcaaaggttttgtgtcacttctctggctctaccttctataccacacaaagattgtatgatgggctcctgttggcttcactctactgctgatgttgtccttggtggtcatcccatggtacagacatctccaaaatgttgggatcttctgcttcaactagtttgttctttcactaatggcctctcctggcatctcagagtgacaagctacaggttctctccatgaccccttcatattgtcaaaaccagtactacctgggtgacacacattaccaagtctggatgccagcacaacgtacaaccttggctgcccctgaaacatagtttctatactctctaaacatctcacagaagatcacctcaatgatgttggtttcttcttaatcacacataatttattagctccagccaaccagcatcaattgtcccagtaactcaaaggttcactttagtagttctggtatcttgtttatcaaggctgattcttcagtcccatctaaccagaaccacagaatcatgaaccaaaataacaaatggttctgatagtattcttaaaacctccagaaacttcacaagtcaggccttcatcctctgcactactctcaacattcctttctatcatgttcccacagaacatcccatatggtctgagattttgcatttgttaggtttgtattttttgcctcctctccctgtaaagcttatgtaagctctttcctgaattggtggtgagtatactgcaagtgctcagtgagtctatgctgaaagagaagatgtatgctgtgtcctggtgttcttgtgaattttccagtcatttctcaacctaaatcagtaaatgcaggtttatctttaagaacacagaatgcagagtctagaaacagaacttgtttacattatagatacccattcttaacctaaatcaaataggttttgatgttgttgtttttagtggtggacattttttaacttgtatttccttatccttggatggatagatatacaatagagatagatagatagatagatagatagatagatagatagacagacaaacagatagatagatatcatttaagttactgactaaaatacttagaaatttttctggtacttagcagagaccttataaatggcttactactaaaattttaatcctccaattgtcttctgtctgccaactagtctatactttacctctaaaattttagtgactattttttattaccaatgtcattaaggtcttccagtatagccattaactgcatgcttaaattattaagcaaaacttgaaatattattttaatacagtaatacacaaattaatgcatttgaaatatcaatgactttctcccaaacaaactatgtccaccattattatcattaaatacagtgccagaacccctatgtctgtggcctgagtactatcttgcagtgatataattctctgtagtgaacatatgaacatggttagtactgtgtcttgggactttccaggttttatagcaattatatttcattttgtaagctcctatatttgaatcactgttgcttttctctaactaaattcatttaaactttaaacaaatgatatcacatgtgtccatggtggtatgcccatagaaggctttcacattgttatgtcggtcctacttctgttttagtcattcctctcttagttgcatttttttattttaatcatgtaacttaaataacaacatctatattaaagtatatcctaatttaatttcatattttaatgtttctaacgaaataatcttttgatttatcctcttagtaaattagtctgaaaaacaattttgctgtatatcaagaattggaacactgcaaatgagaaaataaagtgataacagcagcattttagaacatgaattttagccaacccatcatatttgtgtgccaagtgaatgtagcaagtcttttcaactggtcacagttcacattcctcatttgttaattcagtgagtataggagactaggctttctttttctttgagacacactttcactatatgtcacaggcatacttctgttttctaggctgacttcaaacaccagattcttttgcctaggtttctaatttactggaattagagaggaattccagcacactcatctttaaagttctcttttacatatcaatataattcacaaatagttctctttgaaattatcttatttccagccatagacaaaatgaaaattgcctaagcagtttgatttcattattatatgttgggacccagcccccaagtggtctccatgagttgttttccagcataaccacaggtacctcctgtttttctaagcctcgcccactagcatcctgttatgaatctttcttgttattgaaacattatgccttgcccccatccccttcttgcttcattggccatgggtgggtgttctggtttccttatttatgatagggtgtgggagtgcattctgctagcaggttatgttttcccatgtccccttgcatataagctgctggctacaataaatggatggcattcacttctacagaatgacccgagttgtgtccttcttaatccgcagactctcgcctggtttggttctttggtctctggctctggtgccggtgacaattatatatttaaattatattaatattacacatttcttccttacactttcctctctgcaaacactgccacttaccctactcccttgatacctttatggtctccttttctttgattgctattgttatccatatatgtaaatgcataaatatataaatacaggctactgaatctatttagtgttgctcatgtgtgtttgacttcattgctgacaacttggaattggacagctaattaaggattcatctaagaggcttacttctctctcagcagcctgtagtttcctctagtggcttaattcaagagctgggctgggctctaagagactaccctctttcaaaataacacatctatcttcttttatattattggagacaatcaaagcatcatagcctttcttttgtactaactaccagcagggcatttattaaaaattggtgctcaaacctattatttatccatattgaatacatatttttcctgtttaggtaaatattcattccacaatggggcattggcataaattacataataatttctccatcaatataagacacaaattctcatgaatgttaggttttgggccacaatatagatactgagataaatcatacatgtatcggtataggtgtctatcattctgcataatgtatagataaaaccatgtgccatttaacaattgggataccttatgagaaatgtacttacctgtgacatttttgtcttgcaaacattccagggtggagtagtcactacactctggggtatccctcctaattacatgtaactatagtgagtactgttaaaaatcataacacaatgggactagtgtatgcaagaacatgcaaacatatatgtgtggcataaatgtagtaatatgataaaaattatgccaatgtataggtcagtgactctgaaaggagattaggaagcaggaagcagcctggaagtagtactgggttagtcaatgataggataatgacaggagatgagcgcctaagttgatgcggtgcactgaagaccagaaactctgcatgctcaggctactggcaaatcactttaaaataacttcaactccattcttagcttttttgttttagcctagagtagactttgactttaataactatatacagtcctttttacttcatagactttcttttaatgatttgttttgggaatttcagagatatatacaataattttgattacacccatcgctaccctggttcaccacacaccctgcctcctaacatgatatacttgtttagtctgctgagtccaattactaagtcttagattgaaagaaacaatgtatgacaccataataaactactttttatatctgtattctattattatgttttatttttctatatttacatatcttacttttgaataatttttgataaaaatgaagacacaagcttagatattaggatcaaaatcatgtttatctgtcttccatatctgcttatggtcatcagggttgtaccacatcctgtcatagtggcttcttctggttcttctggagaatcatggtttacctgggactatttaatatatgtgaaacttcaaacacacacatatagagtgcagtctaataaaaaaagatagtgtatcactaatacagattagtaccatggtatattatcaagtattacataacatgcatgatttttgcatgcaataaatttacataattgggggaattataatatctttacatcagtattatcgtgagcatgtgaattaatcccaatgatttccttgcacaatataagaacttttggcttcacttcaatctaatggaaccatcaaacatgtatgaagtatgaagaatttttgaatatggatatatttttatatttgatattgatcacatcaggtaactccacctattgaacatttatctgtcataatgctacccaccccagatcatttttaaaaaaatatttttaatattggggtgtgtctgagaactgatgtccatctttgttatgcatagacacttgcatttctccttgatagtttcaatggtgctcatagttctctgtcacagttgctgctgtgcacggaagacccgaaacactgcatgcttaggctactgtaaaattactttaaaataacttaaaatatccaactctctagcaaggctcaaatattgccaacaccatagtcacttgatgatggctactgagcaaacagatgaaatagtaacaacagcacagtgctaagtgaaatgaacattttcattcaatagaccatgttaatagttttacactaatcatttcagtttattctcatagtcggaagttgcttttacaaggctcatttgttggacatgctaaccttgaaaggactccttcatggctcctatcctcacatcccttctttgcacatgtttgagtggtatgttagagatgttttttcctactatgtctatcccccatattaattattcatctgctatgtacaaatcaaattgtgaaaatagttttcaaacaatacagtataactatacgtgtgcatacatttcaatatatcattattattcactcagttgcacattctaactccatcatgtgaataaatatactgtttcatcttggtggttgagagaatggctacataaggcaattagaaacattgctgtagtgctccacatagagtgaatatacaacctactcacagaaaatggtttcgaattaaaattcaaactgtgtcttgaacatagcagtgagatgcagaagaattgagatgtggttctatctaactttcaagaaaaataatctgttacatttgcatggaaaagttattttgttcgcattctctgtggaattttcccgagtggatgtacataaaaaaaagtaatcaaagatgtcaacttatctacactgctgttcctccatctgtgaatatcgtccatagtctgtggcacttgaacacttggttccaagtggttgcccctgcatgaggagcttttgctattgcagccttgctagagaaatatttcactgggggcagagtttgagagtaaaaattcttgcctagttccaatttactctctctgcttcactctgtgttttagggcgtgagctcccagcttctgccatgccttccacttgctactgggctcccccattatgatggaccccatactttactgtctggaacagtaaagcaaaataaacttgtctataagttgtcttgatcatagtgttttatcacagcagcagaaatacaccatccaagatctcaaaacagatagcctatgcaatgagatatacctgaatagaatccgttattgttcttctttgtcttctttttatatttaagtttgtttcatgctatatattttgattatgttcttcccccttccagatttgcccccagttctgctctatgacctactttatgtcctctctctctgaaatcaacagaaaggaatattaagacaaacaaaactacaaaaaaaatcaaaatgaagtaaaataaccataaatactctggagtctgttttctattgggactaccctggagtacagaactgacactccattggagaaaactaatttcctcttcccagcaggtatcaattgcaaataattccttggtatgggtgtgattttgtgtccacttctgtttctcagtgtttgtattttggctggtttgaacctgtgcagatcttgtgtgtgctgtagaagtccagctatggcagtttggaaggttcaggttttaaagacaaattgatagcctacagtagattgctatacaaataggtagaatgtgaatgcaatggagaggaggcccagtgaagggactatctgtaaaaatagagcagattatacactgtatctcacattcttttttatttttttattttttgatttttcgagacagggtttctctgtgtagctttggagcctattctggcactcgctctggagaccaggctggcctcgaactcacagagatccacctgcctctgcctcccgagtgctggaattaaacgtatttgccaccaatgcccagcgtatctcacattctttaaaaccagcagcatgcaaatgaccaggaaaaggacgtcttcaaggtgctgaataatagtgattggttaatttgggttagtaaattgtagcaaacgcatgaccctatgaaagttactgatgatggtgaggggaacaatgcctgtagggctaaagagaatgcaaaaactctccgtacttcctacctaatatttttatgaccataaaactactctaaaactaaggcttgtattatttgttatttattatttatgtgcagtctgatgtagctgaacctggccttgaactcattatttagcggaggctgtccttcaactcctgatccttaagtgtgcatctccccaggagtaggactgcatcactatgcccagttcctgcagtgaaaagcatcaacccaggatcctcatgcactcggcaaaggatttgtgagctgtgctacatccctgttccctagagtccatatttaaaagcttggaaatgccatggcttaagacttaggtttatgatttttcacctgggttaggtttttacaacttgctttgttttgaaaatcaagtcttagagattagggattattccattaatataatcaataatgatttcacatgattaggtgaggcaattataaatgctaaaacatatttagggaagagaagatggctcagttgaaaagtacttagcattcaccttgaggacctaagttaaatcacctgaactcatataacaaaatataaactgggcacgtagagtttagagagatgggtccgtaattctgcatatttgctgctcttgtggagaacttgagcttagttcccagcacccaagcggatacaaggtgtatcacaaacagttctaggtgatccaacatcctattctggcctcctagcacaatatacatgcacatggaacaaatatatatagaactatacaaagaatattgaaccatacaaagaaatacaaagaaatcttaaataaaccaaaacaaaatctgggcagtgtccctataatcccatcccttgggagccagagacaggcagatcccttgaactcagtgttcaataggtttaagtgactctgtgagtaccaggttatatgacagaccctattcaaaaagaaggtggagagtgacattgacctcttgtcttcacacatgtgtgcatgcagctgcacacccatccatgtacacaaacacacaaccatcagcacacacatatactatgcacatgaaaaactaggaagagatgagataattataacatgtaatctctaccacattagatacatggtgctagtagacagctttattatcaatgcctgttgtaaagctataaattatgatcttttccagtttcaatttaaaaataggtaaattagtttaacccagagcagaaatccattttctctgtatctcttacccatttagttttgaccatactttccacatccacataagcctcacaaatttagcaaaatgatttgaaaaattgataaaacctgacttgaaacagattattgaggaaaactgactttgtttttccaataatttaagataaaattgcaaaatattattgcacagtaaaggggcatcaagacatttctcatctctttgaatctttcagtggtatgaatttatttcatatctaagatgccacacttgaaaatcaaatagagagttcaaagcttatgaaaaagacacaaataaataaaattaataaagcttctacttgaaaatagacttactgggagtaattgtgaaagaaaagatagtttatttaataacatatactgaaatccatctgatctttaaaccataaggtttatacatctgcatagctctgcataacagttatttctaaaaaataactcatagacattgggaaaacagtatctataatactattctatgtgacactaaggatgatcatgctcaataagtatttgttgacaatatttctgcaacgacatgataatttctctattcagtggggtaattagcctgctgttgcccattttaaataaaatgttctcaattgggcactgaggctgacaggcttcctgtttagaaatgatttctgactgctctatagtcaaaaaagccagcaataatttctacaataaaatctaattgatacatactaatttcttcatttatgtttatatcctgttttaaataataaagttgtcctcaaaaataaataaggaaaatgcctttcctaaccttggtatgaaaatttttcttctgacttgatttgcatttgcatatttaagagttaactttatcagaacacagttggagggcagcagtcacttgtattatcaaggcagtctgtctcctttgtaatggtaaatgttcaattttgctctaatgtcaaaagtgcttttgagtaaacagcactgaaagcaacagtgataaccaaaacattttacgatcggttttgtcatcccttgtagatatatttcaacactttccttctggtaagtgaaaactgacaggtcataggcttcagagctttgcatacagaatgcatcattattatggagtgtacaccataattcaacccttgtattccctccctgaattcatttcctgagttgaaatggttattgaatacttaatttactgaatccatgctaagcattatgtaaatatgaggatgactttctccttactctaaaaattcatatatgaatgaaataattgagtttgcaaatgttgtaatcagcatgtaaaatatataaacagaatgaatggataatattgatggtgatcaaaatgcctaattttcaaaatttctttcacaaacactgacttcaaatactaagaattaacatcccaggaaccaagagactggattcctcaaattgtagttacattgccttaaacaggtaacacaaaccaacacatttaaattccacggggtttgcaggtggtggtgcatgcctttaatcccagaacttgggaggcagaagcaagtggatctatgtgagtttgaggccagcctgatctacagagccagtgccaggacagtgcaggttacatggagaaagcttgcagaaagatgaaagaaaaaagaaagaaagaaagaaagaaagaaaggaaggaagaaagaaagaaagagaaaataattccacaatgtctatgtatttgtcctttcaaatacccctttttattcttacaatgattctgtgtgtatagcatgtgtataagttaaccatatgctctctcttatctactacttcagatttctaagttttagactgtagaaggaggagcatgaacaaacttgacccacctatgactttcagattttgtttcttgtgaaggtatgtattgaactaagggcctttggctttctagattaaagttctgtcattatttgccactgacctatacccttagaacttcttttttacctttttattttaaaacaagcctccataatttcctttatcatgaccttgaacttcctctgtaggctatagttttgaacttgcaaatcttctggcatcggttacctaaatccttgtaattgcaggcctgtgccaccataaagaaaactaacatgataatattgtagatttctagtttcctggaaacacagccaatctctaagacagcgggaatgaaacttgagatatttaaggagaataaatgataagcttatcagtgtctcagagtgcagaacaaaaagtcacactatttcataagatttacacatcttatataagatttgtctttaatctgccttgattaggataatgatggagtgattgaaatatagtgggaataccaaggtacaggtgctaaaataagggtccctaagaatcttgagacatgtactcattaatactgattgacaccttgataagatctagaaccattgtaagaaaagcctctgggcatgtctgtaagcagttttccaaagctgggctaactgatgagggaagacctaccctgaatgtctctgattttctacactgggctaatggatgaaggaatgcttaccctacatgtctgtaaggggtttcctagactggactaaatgatgagggaagacctaccctcatctgggtgccacaatttcatggactgagcttgtggactgattataaaataaaaaggaagttgagtactggcatctgtctccctatagttcccagttctgcagaaaatgcaaccagttgcatgatgcttacaccaacatgccttccccaccacaatgccatgaagaactaaaagaacactatgagccaaactaagccttttctgaaataacacattttgtgtcaggcattctgttgcagaaagagaagtaactaatatagaaggtcagtggtggcacagtgctctctgttcaaaagtcaaatagcttgattttcataaaaaaatatttttctacaattatctaaagtgaacacagcatatttatagtttttgggattcccagaaaaactatgaaagataattatttatgaattgtcaatagaacaatatttattttgtgcggttatctatatgtaaagattatattacaatagctatattaatgcattatcttaattattaatagaagctattgatatataggtggttttgtgtcctgaggtctccatcaatctgaaacaaacttacacagttaatacctaagaatacaattaaagctacctagacctaacaatcatatattaagcttgaaggactggtactgtcaatctcttggtgacttagttcacggttcttcttgatagatgagtgctgatatctctagcttcatatagagacttttactcttaaggagaggcaattgtaatctttgtcttcttggtgttgccagagaaaagaacacaagcaaggaaggtggcatactagcttcagatcttcacctctcccttgaaaatggacttcttaattggtctagataataaaaacatggagtcagatgtagagggaaatgcagagatatcagagagaaggagctagcactgccataccttagctcctttgtgtctcagcagacaagataacaaattcttgtttctccctgcttatatcccatttccacccagctaccttacttccttactgtctggacagacctccagcctctatggttagctagtggcatgctccattctctgaccttcagaaaggctttctttgtgtgagcaagacatcaccacactccctagtcctctccaaatccatttcctcagttgcagtctcatctctgttgaatagcacctactgcagcaacctgccacctcctcagcagaaatcatacacctcttctattaaagctttgcttcctccaactgttcccagttacccaggccccaactccagcaaacattccctgggaactgacctggcaaccactgtaggtagtgggtaggctaaatacagatcttcacctctccttcttcttcttctgcaaatccaatctgccagtaaaatccccagctctgtggcacaccacctactggagtgccccctcctctgccctcactttcaacagatcactcagaccttatccattcttcctcccacttaccctttgtgccatatcccaactccaacagaaatttcctaggaactttccagttaagcccaccaagtaggcctgagaagcaagtaggatagcttcaggtcttcactctccatcatttcccctaaatgcaaccccatagtctcatctctaggtctgtagcagactagctattgcatcctcacctcattctctaacttcattctcagggaactaagcaagtctaggtggaacaccagctttccttcttcttgtggacttccttaaccccttatttccatttttaagtacaagatcccaataactagaaacacattcttcatggaacgctcaggaagtagaactggcatcttctcaaaagaatacttattcaagctacacatagtcaccctcctaacaagcagagaggacaacatgaacaacatcagtggaattgattccccaataaaaagacagagactaacagaatagattacaaacaggatctgcccttctgctgcagccaagagacaaaccttaacttcaaggatgtacttcacatcaaggtaaaaggacagaaaagtgtcttaataaatacaaggaaagggggcaaaagcaagagaaggatggaaggcagggtgagattggaaccctataggcagaggaaacaatcctatccttctgggagcaggcattattttttggtaaaagcattaacattataagctctagccaaagaactaggaaaagtctgattaaggacatttaaaaatgcccataccaaaaccaatcagattttctctgtaggctctaaagagcatccaaccacacctatcttttcagggttttttgttttgttttgttctgttttgtcttgttttgtttgtttgcttgattttaatcttgttgttctccaaggcttgattcaccagtgatgagcctatgatctgctttcaagtatttttgcattggctagagtgacagtgtgaagtccagccaggtgggctttaggaagggaaaagaaagaaaggaattaactatcatttgagctacaggttaaaataatagttaccttgctcttggttgtagcattgtggctgagacaaagccatgaggtctagtatcttggcaacagttctttcaccaaaaagaatatcatgaatgagaaatagttgtccatattgcatctaatatggacttaagtccaaatgtctagaggctatgattacatggactatgtaaaagaataacgatcattttaagctgggttttggtggcacacacctttaatcccagcacttgggaggaagaggcaggcagttctctgtgaaattgaggccagcctggtctctagagcaagtaccaggataggctccaaagctacacagagaaacccagtctcaaaaaaacaaagaaaagaataaaaaacatcatctgacacaaagtgacctggatgcctgactgagttcagcggtggcggggagttccatggtgggaggatctgaacatccaacacccagaggcagcctggcctccattcgctggccctggtaggccaggagctgtttctggctcctgttcttcctcgctgttcagagtcatctgacacaagtgacctgtgtgcctgatcgagttcaggggctgctggatccaacacactgaggcccagtgacagctctgcctccaactgctggcccagtgggacctggcacacccaaacactgtggacacctgggtaacagtgatacctccatccaagagaagaggacggaatcagagtattggaactgtttgcatctaccagaagagaacattggttccacactcaccaggagaacaagaaacatttgctacacccaccagaagaaaggatgagaagaggacaaggtaaaagaacatccaacaacagaaaacagaatatgacaacacctgagactaggaatcatacaccagtatgatctgatcatcacaatgcagatgaaccagaagggaatgaccttaaaaacatcttcatgaaaatgatagaggacctcaaagaagacatgagaaaatcccttaaagaaatggaagaaaaaaactaaccaaaaattacaagatatcaacaaatctctcaaggaaatagttcaagacctaaaaactgaaatagagacagtaaagaaagcacaatctgagggaatcctggaaatagaaaagctggataaatgatcaggaactgcatacataagcataaccaacagaatacaagagatggaagagagaatcccaggagttgaagacacactggcagaaatagattcatcaagcaaagaaaatcttgtctaacaaatccctatcacaaaatatccaggaaatatgggataccgtggaaagaccaaacctaagaataataggtatagaagaaggtgaagaaatccaactcaaaggcacagaaaacatattcaacaaaatcacagaagaaaaccttcctaacctaaagaaagacatgccaatgaaaatacaagaagtctacagaaaaccaaatatactgaaccaaaaaaaaaaaaagtcacctcgccacataataatcaaaatgccaaacatacagaataaagagatcatggatgccagcccagactactatacccagcaaagctttcaatcattatagatggagaaaacaagatatcctatgacaaaaccagattcaaaaaatacaaatccaccaaaccagccctacagaaagtacgggaaggaaaactgcaagccaacgaagttaattacaaccagagaaacatagacaataaataatcccaacataccaatagccaaaaggaaaaagggacagaatcccacatataatcttgccaccatcaccaaatcaaaaacaaagaagaattaacaataatcaatagtcattaatatccatcaacattaacaatcttaactcccatataaaaagacatagattagcagaatggataagaagacagaatccttctttgtgcagcatacaagaaactcacctcaacctcacagatagactgtacctaannnnnnnnnnnnnnnnnnnnnnnnnnnnnnnnnnnnnnnnnnnnnnnnnnnnnnnnnnnnnnnnngggggtagcaatcctaatatccaacaaattggactttaaactaaaatcagtcaaaagagatgaagaaggtcatttcctactcatcacaggagaaatccatcaggatgaagtctcaattctgaacatttattccccaaacacaaaggcatccacttttgtgaaggaaactttactaaaactcaaatcacacataaaactgaacacacttatagtgggagatttcaacaccccactcttaccacaggaacaccatacagaaacttaacaaagaaacaaaagaacatagaagttatggagcaattggtcttaacagatatctatagaacattccacccaaatacaaaacattttaccttcttctcagcaccacatggaaccttctctaaaatcgaccatgtacttggcaacatagcaaaccacaacaagtaaaaataaataaataaataaaaataaaaaaaaatgatgtaaccccctgtgtcttatcagaccaccatgctttaaatttagaattcaacaacaacacaaactacagaaaacctacaaactcatgaaaattaagtaacaaccaattgcacaattcatgtgtccaggaagacataaaaaaaaagaaattaaggtttcctagaattcaatgagactgcggatgcaacatatccaaacctatgggatactttgaaagcagtgctgaggaaagttcatagcactaaattgccacatgaagaaacaggagaataatcacactaaacaattaacagcacaactgaaagctttagaaaacaaagaagccaatacaccccagaggagcagatgccaggaaataatcaaattgagggttgaaatcaataaaatggaaactaggagaacattacaaagaatcaatataacaaaaaattggttcttcgagaaaaacaacaagggagacaaacctttatccaaacttaccaaacaacaaagagtgaacatgcaaattaataaaatcaggtatgaaaagggagacatgacaacagaaacagaggaaatccagagaatcatcaggtcatactttgaaaaccgatattcctcaaaatttgaaaatctaaaggaaatggacaattttctggacagatttcactttccaaaattaaatcaagaactgataagcaacttaaatagagctataaactccaatgaaattgaagcagtcattagaagtctcccaaccaaaaaaagcccagagccagatgaatttctaccagaaattcaaagtacagctaataccaaatctcctcaaagtattccacacaatagaaacagaagggacactagcaaactctttttgtgaggcttcaataaccttgatacccaagacacaccaagacacaactaagaaagagaactacagaccaatatccctcatgaacattgatgcaaaaattctcaataaaatattggcaaatcaaatccaagaacacatcagagaaatcatccatcccgatcaagtaggcttcatcccagggatgcaaggatggtttaacatatgaaaatccatcaatgtaatccaccatataaacagaatgagggaaaaaatcacatgatcatttcactagatgccaaaaagcatttgacaaaatccaacaccccttcatgataaaggtcctggagaaatcagggataacaggaacacacctcaacataataaaggcaatatacaacaagccgacagccaacatcaaattaaatggagagaatctcaatgcaattcctctaaaatcaggaacaagagtaggctgcccactctctccatacctcttcaatgttgtccttgaagttctaactagagcaataagacaagaaaaggagatcaagggaatacacatcagaaaggaagaagtcaaactctcactatttgcagatgatatgatagtctacattagtgacctgaaaaaactctaccaggaaactcctacagctgataaacaccttcagcaaagtggcaggatacaagattaactcaaaaaaatctgtagccctactnnnnnnnnnnnnnnnnnnnnnnnnnnnnnnnnnnnnnnnnnnnnnnnnnnnnnnnnnnnnnnnnnnnnnnnnnnnnnnnnnnnnnnnnnnnnnntataccttggggtaacaccaaccaaaaaagtgaaagacctgtaccctaagaattttgagtctctaaagaaggaaattaaagaagaaaccaaaaaatggaaagatctcccatgctattagataggcaggatcaacacagtaaaaatggcagtcttgccaaaagcaatctacagattcaatgcaatacccatcaaatcccaacacaatttttcactgtccttgaaagaaaaattctcaattttatatggagaaacaaaagacccaggatagccaaaacaaccctgtataataaaggaacttctggaagcatcacaatccctaactttatagctctattacagagctatagtcctgaaaacagcttggtattggcacaaaaatagacaggtagaccaatggaatagagttgaaaaccttgatattaacccacacacctacatacacctgatttttgagaaacaatccaaatatatacgctagaacaaacagagcatgttcaacaaatggtgctggcataactggatgcaaacatgtagaagactacagatagacccatgcctttcgccctgcacaaaacttaagtcaaaatggatcaaagacctcaacataaacccagccccactgtacctactcgaagataaagtgggaaatacccttgaattaatggacacaggagactgtttccttaacataaaactagtagcacagaccctgagatcaacaattaataaatgggacctcctgagacttagaagcttctgtaaggcaaaggacacattcagcaaaacaaagcgacagcccacagactgggaaaagatattcaccaaccccacatataacagagggctgatctccaaaatatacaaagaacctaagaagctagtctccaaaacaccaaataatccaattaaaaaataggatacagaactaaatagacaattctcaatagaggaaactaaaatggctgaaagacacataagaaagtgttcaacatccttagccatcagggaaatgcaaatcaaaacaactctgaaataccaccttactcctgtcagaatggcaaaaatcaaaaacactaatgacagtttatgctggagaggatgtggaaaaagaggaacactcctccactgctggtgggagttggcactgatggtgccaacttgtacagctactttggaaatcagtattgcgactcctcaagaaaatgggaatgagtctacnnnnnnnnnnnnnnnnnnnnnnnnnnnnnnnnnnnnnnnnnnnnnnnnnnnnnnnnnnnnnnnnnnnnnnnnnnnnnnnnnnnnnnnnnnnnnnnnnnnnnnnnnnnnnnnnnnnnnnnnnnnnnnnnnnnnnactggaagcaacctagatgcccctcaactgaagaatggatggagaaaatgtggtacatttacacaatggagtactactcagcagaaaaaaaacaatggaatcttgaaatttgcaggaaaatggatggaacttgaagaaaccagtctgagataacccaatcacaaaaagacaaacttgatatgtactcactcatatgtggtttttagacatagattaagggattaccagcctaccatccacactgccagagatactagtaaacaaagaagaccctaaaggagacaaactttgtcccctggagaaggagaaagggtcaccatcccctgagcaaattgagaacatggggagaggggagaggaagctacgagaataagaagggaagaaaaggaaggatgcagaggtcatgaggaagcagaaattttgagtcaggtgtagattagaagaaaggacatatgacagttagggttttagttgggggggttgtagaggaggaagggagggagaaaggaactgggatggtcatgtaattcaaacttttttgtaattcaaatatataaaaacataaaaaatttcatacaaaaaaaagaataacagtcatttaaatctttggttttatttttctattgggtgttaaagagcattatctggccaagtttagccattttgtcaacaatcaaaacctgttgaagaaacaatcaaagtctgttctcaggggttatttgctacttggctccttgcccattaaacttttctgtttgtgccatgtgttgggatgattcagtgagcactgaccatgctgcttttcttgcaatcactgaggacatttttgtctgcatttgctcttctccctgtgttatgctcactggttaatgataccaggatcatgcagagaattaccttgtctcactcttggttttaccagagaaagattatttgctttggaaatgccactttctcataagttttataaggccatggatatgtggcagctaacactgatgatcaaggaggaccagatcctgtgtggatagacttcagatgagtgcttggaagcctccatccacaatcatcatgtgcttgcaatgtggcagctgtcaaaatgacaacttaatatatgactgccctctttctaccaaagatcagattgtaggttagtacagtgcaatagttgatattttcttctggagtcagttttactgcatcctcttgtttatgtttaggctaggctcaatgcagaaatatgccagcatttttgttaaggtctgagggttaaaggaagggctctccatctgcacaagtaaaagggaatgttaagctaactcccaattccttcttatctgcacccaatcaccaggttctctgatggctccttttctcttctgctactggtgaccatgaggaaagaagggtcctttttagtttatccatacttactcacaagatccagacatctatgttccctcccctcctcatgacaatggaggaaggtgaagcccttagaattgctgtaacctttatgtagactctactaccctatgagattgtattcttcattttgcttagtttacaaaaaataaaccattggtggaaaacagctcagaagaaaagctgtagaactaggattcagcaatagcgacattgctgaattctacggttactttggttggttataacaaaggcccaaaaactttgggaaattttgaaaagatgaacttactccaaacacatattaagcttcttagatagtgagtgtcaggacccacaagttaccttggtaatataaaataaatgactatctttcaattatgttagtacttccttttctgtaaggatgtggaatgactgagagggaacccaaaaagtgaagtgtggtacatggaaatctcttaagtttcctttaggatatcatagataacattatgcatgtgaaataatccttaaatttaaaagaagccacactgtacatgtggtattgcctgcttaatctgatacaggaaatgcattgggcttatcatgtcttaacaataggagaaccataaaacattacataaacattgctgccaaattttgagtaaattttgagtaaatttttgaaaagtggagtaaatcctaaattagagtagattcgatatatcagttgacagaggattcggaatggtgaaaatgaagaagtgatttgtattttttttttttttttggttttttgagacagggtttctctgtggctttggaggctgtcctggaactagctcttgtagaccaggctggtctggaactcacagagatccgcctgcctctgcctcctgagtgctgggattagaggcgtgcaccaccaaaacccatcgaagaagtgatttgtaacagcaaagcaaggaaaaagaaagagatgagaaattccaggttttcagtctaaatgagggagtcactttttctttcctgtgacaccaggatatgtgtcctgactttgttttgctcagttcctagatacaaacaaacttctaccagggtggaagcccatggaagaagctgagattgggaaatatgcccaatggccacaggtggctttgtgtaggcatggggaatctgagttgaaattatccaaatgcatgtattccatagcctcatctgagcatggctgagacctggcagatatgtgacactgtgttggcaaggtgttatacattgtgctgtgagcacagtgctataagcaatcttcaggtctggtcccttccttgcctctgaatttgagtagagttctctctggctctgagggaatggtgatcctgaaggtgaagataagtttcctagtccagggacaataaatgaggaattcaacatagtgcttgcatacatgaagaaaagaatgtaagacagaaagacaggtggcaggaacagcagtgaggaatgggaagggagttagtctagttagctacaatgaggtctccaggtgtctctcatattcagtcatatgctatgattagcttttgttcactagtgttcacacaacaaagaggtaacaagaaaccggaaacctgaatctaatttatggcactatcaaactaaagcaagaacagaactgttgacaggatcagggatactcccagaattgcacctgactggcgaggtccttgtcataaacctaactgagcagatttcaagtcttgttcacaaaagaaggaggttctataaaatgggaaggaaggcagctcttttttattttaatcttctctaaaacatgttgttggatcttcacttcctgtggctacatcatctatttcttcttgaaaccatatattagcagaactcatgattgaggaggccttcagaaattacagttctaaacaaatgctttgtactgaacatcctaactatctcactttctcttctgttagtacaaagttgaagatgagacatcttaaagaggtttgtgaaggacctctgttatacttgctctgtctcagaatgggggctgggcttttactttgctacccagtattctttctttctttctttctttctttctttctttctttctttctttttgatgcaaacagtaagaggctttattgcagttgtttatcgagctaaccccattagcttgggcctttcatccatccactatagcagatggctggctacccaatattcttgaaagtacccactcactcttcatctaaatgtcacaattatgaatgccatagttagggtttctgttggtgtaaagagacaccatgaccatggaaactcaaaaaaaggaagtcacttaattgggttagctaaaaatttcagaggttaagtccgttatcatcatagcacaggcagatatggtacaggaaaaggagctgggagttctataccttgtgtgcaggcaataagaggtaagctgtgttactgggcatagcttaatcatgtaggagacctcaaagccccccacagtgacacactgtatccaacaaggccatacctactacaacaaagccacagctcctaatatcaccactctctatgggggccattttttccaagccaccacattgcactccctgccccccataggcttatagccatatcatcatgcaaacacgcattcagtagaaattcaaacgtccccatagtctataacagtctcaaacttatttaaaagtctaaatttcaaagtctcttctgagtgggttcttgccctgaaatcacaactccctttatattcaatttcttcatctgtttatctccttgactgcaggacatagctccagtccacctttcttctcaaattgtacgttttctatttttcctttctcagcttgctccttttcattatatatcttcattagaccagcactaataacaactcctagaaatttcactgaggtaatctattagacttattttctttctctgatgtgcatgagagtaaccaagtccaaagtagttggttcctccttcatcagtacagtcaacagatgtgatattttgtgaaagagacaaatgacattgctattaggattgccacataagctcctctttcggtgttcagcaacctttctaatccaaagtaccaggttttccacattctgaaacaaaacaaacaaacaaaaataaaacaaacaacaacaacaaaacaaaacaaaacagacctgacactgcaacagctgtcactggcagcaatttctgcttagtttgattttcattttgttttgttctttttggagcctctcctggaaatggatctgtagagcaagcagtcctgggctcacagaaatatgcctgtctctgctttcaaagtgcagagattaaaggcatatgccaccagcacccttagtttgatgtttctattgtcatggtaaaagatcacaaccaaagcaacttttagaagcagagtttgtttgggtatatggacccagattgttagatttcatgattgctgcatgctaacagcaggcatagtgggacaacaaactgtgggctcacatcccaggctgcaggtaaaaacctgagagaacaatgtgggagcagcacatgcgaatgtcaggcttccccatgtacctctttatggaaaagcttcacacaatttgtctcatgtgcatttcaggatcttaagtgcttccaccatttcttctcttgtttctcctctttatctcgctgcacacaaacataaagttctcacagatgaacttcaacatgtacagtgtctgttttcagcatggcgttctcatttgcaagaaacagaactgtttgatgctcaaaagtcaaaatgttacaagagactgggcagtgacaagatcccaatcttagtcacagggctctgatgctaagcagattcatgattatctccaagatcagagacatggttgagtagttggggaactggaatgatcttgcttaagatttgagttcccagcatctacattatcagctcacagcaacctgcaactccaattctaggagatggaacactttcttttggcctccatggacaactggacttatgtgaaaaagaaacctgcaaacagggaattaaaaatgaaaacacatcttttgaaaaagattatttaggacaacaagtttctggtacttggctttaggcacaggcctcagatagaagaaaaaaagcctaaaccattctacaagtccttggtaactcttgttatttgagatattttgtcttcctttatcctctccttggccatgcaacttcagaaaagcatggtgagagaattaccattgcctcctttgaactagactcttcttctggagaataacaagcccacacattgtgtgcacatcctttaaaatggcctcatgctgacccaacatagtgaattgaaacctctgtttggagtataaaggctctcttactgagaggatgtagaagaccatgtacaaaccacaaacactgaagtgatccatggcaaagcatatagaaatcctatgacattgtgcttgctttcttagctaagggagagaaaaaaaatcatacaaagctttacttgcttccactcaaatatctctaaaataatgaaccatatatgctattacataagagaaatttctgaattttatcactcttttcttccattttattgtgatgaataaacatacagaaagaatacatatgggaaataagcagcatttgacttatggctcaataatgaagtgcagacaagtaagaaggtagtgattttgaatttatatttagttactttgtataaagttacaggcatctattgatataagaagaaacatttaaatatcagcaaactaaattggtaacctgctaggaagtttcatgtggaggtccatgccaccctgtaccaggaatgtattacctgtacaaaacataacatggtagagaaaggaccttcttaagagtgagcaggagatcctggtactaatatgacatcaccttggatgactggtgtcacaggcaaaagcctcagttctatgctttgctggcctcacaggtcccatactcacttgacatgccaactggataatcaaattgtgaattttgtggaatgggagagtttgcagagaaatttgctcgatgattagtttccttcactatttcaatttctttccagagttgcatatggaaagcatagtgtcataattttaaggatgtggaacatgttctttaaatccacccttcatgagcacatagggtcgggactttacctgactgtttggatcttgtcaccaactttgtttaattcctaggtcatgctaatgtggctatttctaagtcttaaactttgcctttattacttgtgaaagagcaaagattctctctgattgtactattgtgtgtgtgctcagagagagttggggcaagagagggagtgatggggcaggagaaggaatgagggggagagagagggggaaagaaagagatctaatatattccacgcatcaaataatgttcactgtttggagtccaaacagtccaaataatgaagaatttgtccaatcttcaaaatacatgaaatcaagaaaagaaagagaatacaaaccacagaagttaaatatatttattttctattgctgtaaagttataacaaatggagtagcttaacttgccctacatttatttttcattcattttcggaggttaggagttgtgtggtctatgtgatttctctgaatggtgtcttcaaatactgctgtcaaggtgttggttagggagatggtctgatacacacctttgaggatacatcttctccgaagataattagctcattcaaaaaatctgtcccatacatcttcagtcaaacagggcactaatacttcctagcagcagtaatccatggaatgacttctacagcttcttgtaccatagcctcccacctttgtaaaccagagtataacacattgattctttcaaagaagcagtaaataaatatacaatatgcctatgaaagtcttactcaatgtagcataacaggttgcttgttatcatcacatatcataaatagccacacatttagaaaaaagtgacaggagcaacagaaggagtttatgtcaggggtgaggatataaacctgaggagctaacttgccatacttgggagtagcatgtatgctcagtactgttcttactgattttgccatggaaacaacttaagaatgttggtagaatttattgacggagaattgttttcagattttttttatttgaattagaaacaagattgttttacatgacaatcccagttcccttctcccttccatcctcccctaccacccctccccctaaataaaaccctacctatcacatatcctttctgctccccatggatggtgaggccttccatacggtgtcatcagagtctattgtatcctttgggacagggcctagcccaatcccatgtgttttggctaagggaatattcctttatgtagaatgggctcccaaaatccaaacatatgctagggataagtactgaactactacaggaggtcctgtaaatttccaaggttacctcaatgaaatccatattcctggggtctagatcagtcccatgctgttatcccagctatcactctggggatcaagagttcccagaagttcaggtcagttgtttctatgggtttcaccagcctggtgaaaaccctttgctcttcactctttctatgcatctggattccagttcagttcagtgataagttgtgggtgttggtttctacttctgctggatgagggctattgggtgggatataagtcagtcatcaatttcattatcaggggagggcatttaaggtagcctctcctctgttgcttggattgttacctcttgtcatctttgtagatctccagacatttccctagtgcctgatttctcagtaaacctaaaatgtctccctctattatggtatctccattcttgttatcttctattctttgcctgactcaacccttctgctccctcatgtcctctgcatccctcctcttctccccttctcattctcctagatcgcccacacttcccgtgctctcaattggatgaggggatattgaccctttctccttttccagaggaccatgtgtgtctctcttagggtcctccttgtttactagcttctctgacagtgtggattgtaggctggtaatcctttactctatgtctaaaatccacatatgaatgagtacatatcgtgtttgtctttttgtgattgggttacctcgctcagaatggtttcttctagttccatccattttcctgcaaatatcaagattccattttttttacactgagtagtaccctgctgtgtaaatatataacattttgtctatccattctttggttcaggggcatctaggctgcttccagtttctggctattacaaattcaatgttatgaacatcagatcagatgtccttgttgtatgaatgtgcttcttttgggtgtatgcctaaaagcagaattgctggatcttgtggtaacctgatttccattttcttgaggagtctccacacttgatttccaaattggctgaacaagttggcactcccaccagcagtcgagaagggttcccctttctccatatcatctgcggaataaagtgtcattggtgtttttcattttggccattctgacaggagtgagatggtatctcagagttggtttgatttgcatttccctgatggttaaggatttgaacactttcttatgtgtctttcagccattttagattcctcttttgagaattgtctaatctcaaaattgtctaatctcaaattctcttttgagaatttgagagtagttctgtattctattttttaattggattgtttggtgttttggagactagcctcttgaattctttgtatattctggaaatcagccctctgtcagatgtgtggttggtgaatatcttttcccagtctgtgggctgccattttgtcttgctgaatgtgcccttagccatagagaaggttctcagtttcaggaggtcccacttattaattgtggatctcagtgtctgtgctactggtgttatgtttaggaagccatttcctgtaccaattaactcaagggtatttcccactttatctaatagggttagtgtggctgggtttatgttgagatctttgatccattttgtcttacattttgtacatggtgataggcatgggtctaactgtagtcttctacatgtccacatccagttatgccagcaccatttgttgaagatgctctctttgttccagcatataaatttggattgttcatcaaaaatcaggtgtttgtaggtgtgtgtgttaatatcagtgttttcaactctattccattggcctacctgtctatttttgtgccaatactaatctgttttcaggatgatagctctgtaatagagcttgaattcaggcatggtgatacctccagaagttcctttattgtacagagttgtattggttatcctgggtcttttgcttctccatgtatagttgagaattgttttttcaaggtctgtgaagtattatgtttggattttgatggggattgcattgaagctgtagatttgttttggcaagattgcctttttttaatttgttgatcctgcctatccaagtgcatgggagatgtttccattttcttatttcttctttaatttctttctttagagagtcaaaattcttaaggtacaggtcttttactttttttggttagtgttacctcaagatattttatgttgtttgtggcaggtgtaaagcatgatattttcctggtttctttctctaccaatgtgtcattggtatatagtagggctacagatttttttgagttaatcttgtatcctgccacattgctgaaggtgtttatcagctctagtagtcacctggtagagttcttcaggtcattaatgtagactatcgtatcatctggaaatagtgagagtttgacttcttcttttctgctttgtattcccttgatctccttttgttgtcttattgctctagctagaacttcaaggaaaatattgaagaggtatggagaaagtagacacctatgtcttgtccctgattttaggggcattgaactgagtttctctccatttaatttgatgttggctgtcagcttgctgtatattgcatttattatgttgaggtatgttcttgttatccctgatttctccaagacctttatcatgaaggggtgttggattttgtcaaatgctttttaagcatctagtgagatgatcatgtatttttttccctctgtttatattgtggattacattgatggattttcatatgttgaaccatccttgcatccctgggataaagcctacttggttatggtagattatttctctcatgtgttcttggattcgatttgcaggtattttattgagaatttttgcaccaatgttcatgagggatattggtctgtagttctctttcttagttatgtctttgtgtagcttgagtatcaaggtttactgaagcctcataaaaagagtttggcaatgacccttctgcttctattgtatggaatactttgaggaaaattggtattagctgttccttgaatttctggtagaattctacactgaagccatctggccctgggcttttttttggttggaagacgtctgatgactgcttctatttcattcgttaaaggtctatttaagttggttatctgttcttgatttaattttggtaagtgaaatctgtccagaaaattgtccatttcctttagattttcgaattttgaggaatataggtttttgaagtatgaccttatgattctctagatttcctcagtgtttgttgttatgtccccttttcattcctgattttattaatttgtatattctctctctgatgtttggtaagtttggataaaggtttgtctatcttgttgattttctcaaagaaacaactctttgttatactgattctttgtattgttctcttagtttccattttattgatttcaaccgtcaatttgattattttctggcatttgctcctctggggtgtgttggcttcattgttttctaaagctttcagttgtgctgttaattctctagtgtgattattcccctgtttcttcatgtgggcacttagtgctatgaaatttcctcttagcactgctttcaaagtgtcccataggttggggtatgttgtgtctgcattctcattgaatttcaggaaatttttaatttcttttttatttcttcctggacccaggaattgtgcaattggttgttacttaatttccatgagtttgtaggttttctgaaattggtggtgttgttgaattctaactttaaagcatggtggtctgataagatacagggggttatttcaatttttttgtacctgttgacatttgctatgttgccaattatgtgttcgattttacagaaggttccatgtggcactgagcagatggaaaattgttttgtattttgatggaatgttctaaagatatctgttaagtccaattgtgccataacttctattagttccttgatttctttgttaagtttctgtatggtgttcctgtccagtggtgagagtagggtgttgaactcccccactataagtgtgtgcagtttcatatgtgatttgagttttggtaatgtttcttttacaaatatggatgcctttgtgtttgaggcataaattttcagaattgagacttcatcctgatggatttcccctgtgatgagtaggaagtgacctcctttgtctcttttgattgattttagtttaaaattcagtttgttggagattaggattgctacccctgcttgtttcttgggtgtttttgactggaaaatctttctctaacctttaaatcttaggtactgtctgtctttgaagttgaggtgtgtttcttgtgtacaacaaaaggatagattctgtcttcttatccattctgataatctgagtcaagattgagttaaaactgttaattttgatggatattaatgaccattcattgttcattcttgtttgtttttgatttggtcatggtggtgaaattatgtgtgggattctatctctttttccctttggtggttggtaaagtgggattatctattgcctacatttttctggttgtagttaacttccttgggtagttttccttccagaactttctgtagggttggattgtggatatgtattttttgaatctggttttgtcatggaatatcttgttttctccatctatattgattgaaaactttgctggatatagtagtatgggctggtatccatggtctcttagtgtaggtagactatctctccaggaccttctggatttcagagtttccatggaaaagtcaggtgtaattctgataggtttgcttttattagttacttgaccttttcctttgctactcgtaatattttctctttattctgtatgtttggtgttttggttattatgtggtgaggagcccttttattttggttcagtatatttggtgttctgtaggattcttgcattctcattggcatgtctttatttaggttgggaaacttatcttctatgattttgttgaatatgttttctgtgcctttgaattggatttcttccccttcttctatacctaatattcttatgtttggtcttttcatgtatcccatacttcctggatattttctgttagggatttgttggacttaagatttccttatcttcaactcctgagattctctcttccatctcttgtattcttttggttatgcttatgtctgtagttcttgatcatttacccagcttttctatttccagcattcccctctgattttggtttctttattgtctctatttcagtttttggtcatgaactgtttccttgagtgatttgttgatatcttgtattttttggttggtttttcttccatttcttaagggattttctcagcactcaggacatcatctataaagaatcttgtgtttgaagccattcttgctttcacagcatgtcccaggtaatcctgcagcacatagaaggcactttgttaacaaaggaaagcaaaacatcaaataattaaatgagagaaatacttattaatgttttattatgctgagactagacataagagctgaatgacaaattttgacaaaataaaaataggcacatgttttgaggaggttccatcagaaccagggactggtaggtaaacatgatgtcactggggaactgaaccttactcatctggcagttataaagtctagtcatttacttgtgtcttatacaactatgtccactataatttttattttttactcaaatccaggtgaaacttcctagtctatacaccttgacccctacatacaggcaggagttcagaagtagggtactgatgaagactccagagcatagcttagctcgggctggggctggatctttcctttctttctgtgttcctgcctggaatctgaaaccaaccatttcaaggctacttccatactaatatactgggtgtgactgtctttttaaacaaattactaaatcatctttgatatttgatcagtatattcattttatgattgtcaatgttgaggatgctatctcatagaaatgcatacataaaatggcagaaatatatttatagccattttagaaattgttacaaattctgtttttaatacaagcccaaaatttatataatttgcaacccaaaaatttatataaataagtaactcaaacaactgtctcagaattaagcatttaaataaaataaagtcccaagaattagtaaatatatatctatacctatatctatatctatatctatatctatatctatatagatagatagatagatagatagatatcaagtaaaccattatgtatgttattatggttctggaagaggagaaatatttgtatgttagtaagagcactgtagttcatttcaaacagcaggcttgaattcaagctgaagagtttcagacagtattcacagtcatcaggctagtactgatacatgctatttcagtgcatttacatgataaaacactggtagatacacttcagatccattccttttttaaattaattttaaatcaattttttggattttttgcattctgataccatttactactaccaacactttaactctacatctgtagtcctgaaattcccccaaatcatcaggcttatagagtaagagactggggacttaaggaagatatgtcacttctcacttgctggtgtcaagatcttagtgtttttggcttggatgggatgagtttcacccaagctgtgtctttagggtcaaatagagagagcttggtttaatagctgtgaagcattggcagcacccatggaggagaaccccaggctctatgaagttgagaagtatccacagtacctgggacagggctcaatactaccaaaacttgatcttttactaaattttagtttatttatgcagtatttttttcttaattgctggattttttggggggtggttgaaaggtcggctcatgaattgagacctcttgctgctcttgaagcagggctcttcctggttctcataactcacatggaagcttgaaaacacctgtaacttcagttctagggactcctgtggcctcttctgaaaatatatggtacttgaatgaacattgtacacatgaacatacacacacacacacacacacacacacacacacacacgtcttcttatccattctgataatctgagtcaagattgagttaaaactgtgttttaataagtgaaacaattaataaaatatctaattacttgatactcttaatattataaacaggtgagctttggaaataattttatcatctttgtttatacttctgggaagagggtctacagagcttctgaatttaatatccaagaagtagaatctttggccttagcttttaacattgatgaaataatgatacaatactcaaatcaaaaagggaggtcaaatataatatatgcttaagggtttataaggacaaccagatattataagttgtaattattaccagtgatcaaaggacatttggaaatatttatttgaggcaaatatatgtcttctgaattaatgtgccttttgagtcttgctttacaaagagtgatgtaggaaacactgcagggacaggaatttgaaattaagatcccaagagtttccttcacctttctacacagaataatataaaatgagtataatacatgccttctagcttttttaggcagactgaaatataaacacctgaccaagtgtttctgggtaagcatctgattgttgtataagagaatattttatagagaaaaattgaaggcaattatgcaaattcaactaagattgtattttatagtctcattatttgacatttatataaagttgttagagagtgatgagtattaagctatctacacacaagcttacatcaagtacagtttttttttatttttataatgatcccatgtataaaggacatgatagggcaagaggaataatcaaagtgggaaatgttggacaagtaacaaaaaggttgagagatgtgttggctgtatggaagttcattatgaaattaactattttaacatttagattttccttgatataaaatattttgagtatctagagtaatgcctggaaaagaaaaaacatggtaaatctttgactatagtagcaatcacaatgcatgtcaaaactcattccaaccagacgaagtttaaacagtaggaatagttcaaagttgtttcctcattaagctctgttactatggacacatcagtcacctgcacatggatatattttacatatatagtatcattctcaaaaatccccagaatttcaacacacaaattcaaatatttttacagacttgtgaaaaattaatatttaaaatttcattccaactggagcatatttgaacattaaattggatgatatttctagttatatgatggcataggagtacatatagaaatatcaaaagcaagacaagtcatcacatcacatggtcattttataccaggggaaggaataaactatatatccatgtaatttttctttaaagatggaataggtgtctagagatatgttcttcacttttctttctttctcttatacccttccttttgcactacttccagatctcagaaagtggtaatgaattacctgacattattattagtttttattccagttctgctttgttttgctggatctatttgagtcaggattcttgctctgaagccccgattcccccatcttacaccacacaagcactgggtgacaggtggaggccatcatgtctggatcaactttttatgtaactcacaaaagattcagaataatcatgttagctggtgacaagaattatattcattccacttagtaaataagcagagaaaaattgaaatgtaaaattcaatttatgtgtccagatttttaaatagcaataatgtattactgagtgattgtgcaatgagatgccaaatttgtctgccaataatttaagcacatgaattttaactactgagatcataaaagaagggttgtgtaataaaaattgggaaggtagtgttactcaaacacaagttagaatcaaaagtaaccctgggaacataaagaatttgaaaagcttaagtatgctatttaaatttacataacctcacagatgttgactattttctataattttataataaattgcttagaattctctgtactcactaggaatgatttctcagaaaaactgaaatacttgaggatgggtcatgtataatggtcatctctactttccatccctctccagtaagggtccaaagaggatggcttcccagacaccaagggcttgagtgcatattactctgttaagaaagggagagtcggacagttggccttttgtaactattaattatccaggaaaccagaagatgactccaccataaatattttttctaaagagatgcgcttaattatctatttagttgcatccttctagacacccttcaagggtccctccatctttcaacgtgacttcattataggccaagattatatatagcacacgaagccttctggaaaaattttgaacccagtacaaattgtgccactgtacacactagtgtgtacaaattagtacacactaatcttagaaagttattgttaaaaattaatagtagttgtcaactaagtgtgctaatcattgttgctcacattatattggctttcatgctgcatttggagttttcttggttctgaaaatctcttctttgtaacactgaagagctggcagtggcaggtatctatactataatctagaaaccaagggaatgtgctcatcacaagtatctaagactagacagaagctttctctccaaaatcaggttatcttacaatcctcagtatcagagttgagcatggagtaatatcctctgaaaaattttcatttatccagtgtcttgctccaaactcattgtgtatagtacttactattgagtatagcaggtacacactttaactgcatgaccatcatgtagaaaagtgcctaagtataccctcagctacaatatatagactacaaagacatgaatttaaatgaaagaaagctaaatcaggcaaaataaaaaatttgcaaaatctagcatattactgaaataatcagtatttagactaaatagactaaaattatgttaaaggcaacacagaaaaacatcattcaaaaggataaacaatcaaatcacaaatccagggtaaatctgactccaggtctctctgggggattcagtggcaggacaggaataggggccacagttctggagactcaaacagggaaaggtgagcaggaaaaagcctggcagtcacctcttccactgggtgccagtccaagatagatactggcggcagatactggatgactctgtctgactccagttctctctaatattggagaggctaccttaaatgaccttgccctataatgagtatgaagaataccttatatgccatcctagagccttcacccagtagctgatggaagcagaagcagaagcagagatccacagctaggcactggcacaacacttagaatccagttgtagagagggaggagtgatgagcaaaaaggtcaagaccaggctgaagaaacccacagaaacagctgacctgaacaaggggaagttcatagacccagccatacagctggagaaccagcataagactgaaccagaccccctgaatgtgaatgacagataggaggcctaggtagtctatagggcctcttgtggtggaaccagtatttattcctagtgcatgactggactttgggagtccatttcccatggagggatactctctaagcctaatttaaataaaaaatatttttaaaaatccaggataattttaaccacacttcatcaaaacacacacacacacacacaaaagatttcttcacatcaaataactgatttccatttaaaaaccaactgactctaacattagaatattttaaaatgtgttgttaactgtatgtatgttttcagggctgggcatttggcactggagagtcaatagatacccaccaactcccaattttcctcatttgcctattgtctttttatagggtgagacattgcgggatgttcccagtccagtttggcatgtccactggtgtcattcacattgtacagcttcttgtacactaacgttggtgagattttatgagtgtagcatctgacagttctaaaagacaccacctcacaacaaacaccctgatcctctggcttctaaaacctttattactgcacttttgcaatgttccaagagtcttagggatgggaaacaggttatacttatacatatgtatgtgtgcatatgcgtacaatacatatatgcatgcaataacaattactgaataaagagacaaaaaaattaaggagattggagaggggtatttgggaggatttagagggaggaaaagacagaaaacgtaattataatcgcaagtactttaaaatgtgttgtgctatttagcttttcaaaatacaaattagcccccaggatttctgtttcctctaaaaattactgtgttctagattacttaatctaagtgtaaagctcacatgaggttatatgtaatacaagagctcatataaggagcaagttatagttctaagggtactcatgatttttagagcagttaatgaatcaagaatccaacttattcaactttaggcaaaggaagatacttgaggtggtggcaggcttaaggcccaggctgacaaaatctgctgctctgcagactcacattcaactctttgagtctgtctactccaacatcaactcattctatgaactgaaagagctcatggaggggccagtcctgttgtccctgactagggccagtcttaggctgattggctggcccccagtttggacctgctttgactagagcctgtgcttcttgctctgttggaagatggagagcatggggaaatggtgctgcctgaaggatacaaatgcaaaggtagacctcagcaagtgtcagggaggctgacatcagggtagagagctatgcagcagtctggagctcccacaaaacctgccccagaatctttgcctaaccacaggattaccctgactttagacaacagcaaggtatctaagatgagaccctgcaactgttcaggatatatggtacaacagaaatcagaaaccttgaaccataccaacaactcatctcaatgaagaattccatgtaaatctgtttggggaaaagtatatacagtgatacactacagtttccaatgccactacaaggaacaaatatgcaaaaaagaggtaagaaatatgaaggaatggagagatgtatgtggtggagagaggcagaactctaccaagggccctgagcatgccactggtaggtgctaccacttgaatccatgttgatacccatgacatctgcatccagggactcttgatgtctgtggcccatgttaccattgaaaatcatgtagatgtatgtgcctgaagccatgttgatatctgtgattcatgctgccatagggatcctattggtgtccttggccctgaggcattttgatatccttggcctttgctgttgctaaaggctgtgacgctgtacatggctcacactgcagcatatcacaccagtcaggagaacaggtaaaagctacactagcaagaaaaacgtaagtgaactaaggcagagactcactgctggaccaaaggacatgatagccccaagaaccttaggtgggcagcccacctgtggacctcctccaatctctcagtacccactttcgtttcactatccccaatcccatttcacttcccatcatcctgacccaccacaaacctcagtcagaaagctccttgaggcaccaaaggccaagctagcaaacagaaatctagacacaatcttggacagagactccctgctatgccagaaatctggttaccagaaatccaggccacaaagaccagaagaacaaaggagaaacataaatgaaggaagaaatacccatccacgctgggcgttggtgccgcacacctttaattccagcactcgggaagcagaggcaggcagatctctgtgagttagaggccagccgggtctccagagcgagtgccaggataggctccaaagctacaccgagaaaccctgtctctaaaaaccaaaaagaaaaaaaaagaaataccatccaacaaagacaaacttataaattgtcaactagacctttaaacatcccaaacccaatgcctagatgccagtgcaaaaacagagtcaacaacaaccagggcaatatggcaccaagagagcccagctatcctattagagcaagctctgaatattccaacatagctgtgtaaaaaccaatattttgatattttgaaaaggtagatatcttgtccttgccataggaaaattgattcaagctaaagatggcatccatttttataatcgtaaaacaggaagatttcggcaactttaaggacagcttgatctatacagcaagttgcaggctatccagtaccacagaatgagaacctgtctgtaaaaacctgatttatacataagtatatgcatgcacatatggtctatcaggatattgttgctactgcttgattaatttttttgttggcaagatctcagtgtgtcatctagacctcaaattcttactcatcctgacttaatttagttagggtttctattactgtgatgaagcaccatcaccaaaaggcaagttgaggaggaaatattctgttcatcactgaaggaaatcaggacaggaactcaaacagggcaggctcctggaggcaggaactgatacagaggccatggagggcagctgcttactggcttgcttcccaccacagcttgttcagtctaccttcttatagaacccaggaccaacagtcaaggtttggtatcacagcatcatggagtgggccctcctccattgatcactaattgagaaaatgccctatatctggctctcaataaggcatttcctaaactgaggctccttcctctgaggactctagcttgtgccaagttgacacacaaagccagccaatacaacagattaaagaagtctgtagccaagtctggagttcatgttttttttttttttttaatgaacatatattcagtggaggataacagtaggtaacataacaaaagtcaagtaacctaaaatatttacaagtaggcttagatgcgacatgaaatgtacaacgggatcagggtcttgaagaagcttgctatagaacagaaaggctacaagacctgcctatgcagaggatggtggtgacaaagcaaaatgaccatttccttaatctcaagaataatctgaaatgaagtgagacagccactgcaggaatattgatcctaggatacacattttaaggacattaaaaagaaaaggaaaagaaaatttacctaccagtttatctgacagaatatacacttcaataaaattaagagaatttaaaaaatcaaaaagaaacaaggcaaggtccagaaagaataatcaagtaaagaatgttggtaatagaagccacattagaagaaccaagctgaaagctttggaacaatttggaagcatcaccaggcttgagaactgcagaataatactcctaaggaagaacttcagtgaattacttggaagaacaacacatagttcattgaatttatagttgtgttccagaaatatatgaagatatggaaaacatcagatatctcccactttccttaaaattatagcaaataatatagaagacagaaaaaaagtaggaaagaggagggtggctgggtttaaggaaaataaatgcataaatcttttgcaggaaaggggatacattcagtttatggcttgcttaaatgatgaataattatactacaaataagaaaataaattgaacaagggctaggtctgtgtcatggttttaaaaatacagcccccagtaggggtggtactactactggcactccctgtagggaggtatggctttgctggagcaaatatggcctttttggaggaagtgcatcactctggaggtaggctttgaggtatcatatatgcttaagccacacccagtgtctcagaccacttcctgttgtctgtacaagatgtagaactctcagatgcctctccagcaccatgtctgcctgtaggccaccatattctgacatgatagcaatggattgaatctctgaactataagtgagctacccaattaaatgttttcctttgtaagagttaccatgaccatggtgtctcttcacagcaattgaaacagaagttgttcccaggggttgggttatttctttggtaggccataccatgttactatttagaagaatatcgacttttggagtttgggttagcaaagcagtggaatgctttaagtgcaacttaatgggccatactagtaggaccattgaagatagacatgctaagagttatttgtactgtggagtgctgtctcaagaggttacagagaatattaatatgtggtctagagaatgttcctgtgatattttgatgaagaaccagactactttgtgaccttttctaaagagtatatctgaggctgaagaggagagatttggattagttctgttggcaaaggaaaatctcaaaagagcctagtattgcctctgctgtatggctactagtgttcatgcttgcaaagattcatgataaaaaggagcaagctgagtaaagaaaactagaaaatatacaatttgatgagaaaaggaacaccaagtagagaatggaggtaagtcctgtgttcaaacagataaacatattaagaaatggcgtatagggagtggtgacctcagggctagatcccgccaagctaaatttacaacttgtaaaaagggattaaagaaaagcttaaggaagtgtatggtggtgcatgtctttaatctgatcacttgaaaagcagaagctggtggatatctgagtttgagtcaaatctggtctacaaagcaagtttcaggtaatccaagcttaggttgataaggactccattagaaacagaaagctggtgaagattttgttgaatgagatacccatgttccaaccccaacaaacagcaaatcttggcagttctggccacatggttttggctttagagtcaaggatagaagaaggctatggacattctttggagactaagggacgccacagaggtcaggcatgaattagaggtgcccctgagtggaggtctggagatgctgttgtgtcaaactgtgaaagtgaagcctggattgccttacagaccccaagatgttggagatgccagagccatggggtacctgtccaggaaatctgctaatgtaagatccccggaagctcaggcctccagaatctcagcccaggaccaaggtcaccccaatcaccaggaggattcgaaagcttgatgcaaactgcatgaggctttattgtttaacaagctaacaccatgttagctctggcctttcatccacccaccagggcgaatggctaggaaagacagctcaaagcgtctgcatagagaacttatagggcagtgtaaggggattgtctaggggtatgcacaggttcaggattagtgtgcctccaggcttggagggcttgccctctattgattagtcaactggttgttatggcccataggccctccaggggtggttgcaatgctctgctcatcattgctgtgcacctgttgtaaagcacaccccaaagccataaagcatagcaccaccagctaacttctgattggttccttgccacgaggcaggcatctaacctgttagtgactaagacaaggtcagataagcacgtgtttggctgttatggctgctgaaagggggagctggtcccttcattaacagggagtataaccagctaagagaaagaaagtgtgttgcagtcaacaaggctgaacggagttggaaatctgaatagcattttgacataagatatagacatgcatagttaggagtttgcccagctggttttcaatcttgctttgttcaaatatttcttcactatcctcccttccccatattttgcagtggtaatgtatgtcctttgccattatatgttggaagtatgtgatctgccttttgattttgattccataggagattacagttaagagattgcatgaaactcagaacagactttgaactttagacttttgaataaaattgagactataatagtctaggagacttttgaggttggactgaatgcagttttgcattataatattgttacaaacttttggggggcaaggaatagaatgtgttagtatgaaggaaaattgcccccaaaggaagcggcagttttaggaagtgtggatttgttggaggaagtgtgtcactctggagacaggctttgaggtctcatctatgctcaagccatgcccactgtctcagatcacttagaattgcctgtgtatcaacacatagaactctcagctccttctccagcaccatgtctccctgcatcatgccatgtcccaccatgatgacaatggactaaatctctgaactgtaaggcacctaactgaatgttttttttttataatagttgctgtggacatagtgtctcttcacagcaatgggaagcataactacgacagtctggttgagtggaaggatgaggttttaagtaaggggatgtatgtgagtctctaagagcaatactaatgctgcaacaaccaccactaattcaatgcttataacaagtggcacaacttgaaatcatagaaatttattagcccagtttagcagaataaaggatacagttaacaattattgtgtatatgtgcagatgaagaacatgatatggtcaagtttaaataataggtccaatcataatgtaaaagtataatctaaattcctattcagcatattaattattcaaattactgcacgcagaacaatacataattattagtggagagtatgtaaccaccagcaattctctatcagtgaagaccaaatataatagtcaagatatccttgtagagatggaatactaaagaagactgtcttataggcatttgttattaacattgtttaatgctctcaattagtcttagtctcaatactttgatgacagattatctgttaggatttggtgaaataatctcctatttgaatgattttgaaaacaaattatatcttaaaaatgaagctgtgaatcaaatcagaacaatatcaagcttgatacagtaaaatcacctgtgatatcagtcctaggggcatttcaaattttattatttgcattggtataatattacatacatttccacctctaggatgttcgtttcttacactcacttcaagaagattaacaattgcatttccagttgactcttggggctgggaggtggctaaattggtaaagggatatgctacctaggctcataatctgagttcaattctattggtgagctaaagattgttaggttctttgccaatgtagaagatagaataaagtcaggatgaatacctgaatatcttgacaacaattgtagaatgcttgtgtcaatgcttcaaattggcaatacaaatgttgttcccttaaagttaaacaactctaagagaagcagattgaggctgaggtccactacttcagtccagtcatctaagagagtagtgtatgaaaatcctgtaagtgaattgttcctttagggatggctatagacatgcccatcctgatttctggattccatacaaacaagcataaagattgtggcccaaccacaagtctaaggagtatgaaccaccatgaattataaacctatttgaaaagaatgacttttttgtttgtagtttaaatatatagtcctcaatttgatatctgtaatagcaacaaaaaatctgttaaaacacaggacacgtctattaggacttcaaaaataggcagtaaatattttcaggaaaatcagtttatttgtttcccagacaaagtcagtttgcctggcatttcttttgtaagatctcgctgatccctgatatcatgtcattgtaaaaaatccatcccaatgcagacagataatccaccatatagattatgacccagtagagcaactacagcatttttatggcaccttaatttgaaaacattggaaagagttcatgaaggaaataattttaaagagtctaagaagtagaatttatcaaaggctgcacacctttttatatgaaaaactgtggtagagatgggaactctaacaatgaacaagacatgatcccatctttcatcacattaattgtatacaagaaacatgacaaataaaatgtgacacacaagatagactttgtgccagaactaataggaataggatgaggcaggacactgcattaagctgagaagaaccaaaagcttttttactaagagtcagacatagtttctatcaaggtgacatcccaccaaaggtgggatctagtagagaactaagcacagaccttgaacctatctaagttataggagacagcatctttgagtatgttaacaatagaagaagcctgacactgtaggaaaacataaggacaagcaggccctctaaattgccaagtccaaatagcgtggaataaacataccttagattgatggaaatctgtggactgagtcctcagagcaggtgtctgtgttccaggcttctgtgatggaattactggtcatgaaaactctagttttcctagggtgctataaaaatgttcttggctgtctttttcaattttgtagacatttcgaaaagtttgaattcttgagtataatgaaggagagacataggtgactgtagacaagaaggtcaaagtcagtttatatgctactttgaattatgtgataaagcacctaaaacttaatggacagtcatttaaaaggagtgaggtgatttagtttagatttgacaaggtctgtatagttgctattcatagaggttgcaaataaaagtatctgaatcaagaaggattccacatgacctgtaaggaaacctttgagacttgcaagctgaagttctaatttctttatgaagtcatcagagattgaagcttcaccctgaggactcatcacaggtgtcttttaatagaaagtcagacaatgccattgttagctctgagaagggcaacacataaagaggaaatgctcatatctactattgcccccacacatcccaaacccccagttatctgtgtgtgaacaacatcttaatagtacattaatcttccccaaaagataaagggattgtgaaatgctggggagagctctgacactgatcagttcccactcaccatgccaacttagaataaagacaaacatccctagaaataaatatttatccatgacattttttatcaattaactttcttgaataaaccacaaagctgtctattatcccagagatgataggacactaatcttcttgctgccatgttgagcttttctgactaagtgttttagaaataaaacatgatagaagttgctagccatgccagtagacgtcacatatccacactcaatgacagtgcaatttacagattctatggatcatcttctcaacctcaccacacaagaaacaccacttgtttcttctttgtttaatgagttttctcagacaaatagaataaagttttattttcttttcttaaaccactacaaagtatcataacattagccattagttaaaagtagattctgatatctgtatattcaatgtttcaatatagaaaaatttctattcttctttcttttgattacagaatattattttaatgcactggagtactgaagtatttaatgaaaagctttctacagtgaacaagaaaaaaaaacagagctggaaaaggatgatatctactgactcacttgatgtctttagggtgcagtgggggttgatgggatgaatagatgtaatatagaaaagaaagtagtaggggccatgacatccttgaaaatatgagagacacaaaagtaatggtggaacatgaactcaaggcctttcattgaatcaaagatagatactttatcaattattacaaaatacaagaaatatggccatcttgtgcaggtatatggggtatgtagaaggtgtacatacaagtcttagtttttaagtatgaggaatatattcacatcaattatgttaaaattagtatgaaaataaaatgtacctgactgggtgggaaggatttttttattttcttacaatagttcatatggaaataccacaatttatgctatcttgtaaaatttatgttgatcttgaaaagtaataaattctcacatcaagctatgtattctgttgtctgtacaagatgtagaactctcagatgcctctcgctttatttatcctgttgatgagccagcacctcaggctttgttgcttctgatatatcagatgttttttctgctctgcttcttagtctggctaaagggaagctgactgtttcaaccccaccaagttagatggactcttagtatacttttgtaaatagaatatctctattttaaaggctatttggcataacatttcatatgtttattcatttactcaatcaagatttattaattccccagaccccttaacagacacagatcacaaaaatctataagaatataatgaacattttattaattagaaaaatatattctctttaaaatttagcattaattaagcattatctttacatctgcctcttatatgatttctttccatttcaattgacttttgtatttcaaggtgtaactgtgattttttacctctaactgaaggacctgtggtggtcagtttcaacaaattaaaacatgctacaaggaaagataattttttcccagtttataaaattttaatgtaccctggacaaatattgtaaatattttcatagactttcaaatcattcttggtagataggtgtcatgtgctatggaatattagtttaatgatgtaaagatgtgttgctgtttgaccttgcctgcctaaggcacctgatgaaataaaaagctgagtggccaatagtgaataagcaaatataggagtgactttcaggtagagagtaactatgaggaggaatctaggctccagcgagagagagggagagtgggaggcaccaaggagacaccatgggccagccagacaaggaagaagaaggaaagcataaaatacagaatgaaaggtaaaaagccctgaggcaagctgggtggtggtggcacatgtctttaatcccagcaatgggaggcagaggcaggcagatctctgtgagtttcaggctagtcttatctacagagcaagtaccaggataggctccaaagccacagggaaaccctgcctcaaaaaaacaaaaacaaaacaaaacaaaaaaaaccaaacaagtcctgaggcaaagtggatttacatgagaagaagagagcaacaatcacatctctgtcaaatataggaattttgaacactaaggtaaggttgaacattcataattaataaaagttctctgtgtcattttgggagaaataattggtagcccaaagaaaattccaactacagtcttggtcaaagaaaatcaccaatctccctcacttagataattttgcaacttttgtgatattcatgtttatttctatgcatgtaaagcccatattgtattcacagtaagcctgataaatatatgtacaacacaagccatgttaaatgaagctgcttatattattcatgctcctaatataggatatttgctgcagtcatcaacatgtcctctctactaaaaagcatcctcttacttagtaaatgctgattgtgagagaagagatgggaaaaagaggaggaggaggaagggatgtgggcagcagtaggggagacacaatggtgctcacagactagggctacatctgggaagacaaatttaaacagaaccacactaacaaaatccacctaactggtctgactttgcatctatatggaatagatatattcacttgcatagatttatatggggtctgcacctgaaccagtgaactgtttaacaactaccaagaagacttgtcctcggcactgtatagttttctcatttgtattttacattttgtggctcttattttttggaaacaagtcattctgtcacctaggatttagattggtggaactgaacatcctctcacttcagccacctaaagtgcatggattagtttttcttgctcttcttaatttgagttttcaattattcattaagatatttggcctgacttggctggtattttaaagtgtttttggattcatgttcatatgggcttactggaaatgtgcagaaaatccaaatatcagtaatattgagagctcattgcttacgcatctgcttctcaaagacttagagagatgagatgcaccattggaaacctacagtctttctatttataaaggttagcatcttctgccaagaatcacttagtgaatttccatgagaactgcatatgtttcatactgcagttagtatttaagctttttaaagtacattattgtcaaggggactgcagagcctcagtatgcatccttatttatttcaggttaaaaaaaaacattcaaagttagattgcacacttatcttccataaaaaaaaacattatactatcacatgtgcaaagtagattcacatgagagaaagagagcagcaatcacatctgtgtcaaatataggaattttgaacactattaaataatatttagaagataattttcatctcatttttctcactgccattaatatggcatgatgtctctatttgtctttaagggcatactgaatcaggttgtagttagcaaaacttattttttaagaaagaaatccatagatatggtttctgcagatagcccatggcatccatgttttcaacagcatgcattatctcatgaaatactgggaattgaacctgggcttcctccatactgggaaaccactccaccagctgagaactgccccaactttcctaacttcatggatctcttagtttgaaaatatatttggcttaattcccatctaatttttcaagtacacttaattgacagaccagtttttatttttcacacttgtaccataaagggctctagctggaaaaaaatatttggtgaaaaggatgaatcattatcaagaaaaagggaatagaaaatgggacattcttgtgaataaagttctatgtcattaaacaagtccttacagtttgctggcagtttagttaacaaacaggttctgaatattaatagccctacttatacagtataggatgagcacacacatatgtatatgcatatatgtgtgtgaacatttttttaatttttttcactttgaatttcacttgctcaagtgttatttagattcacttagcttatatttattttgacatttctgtagttgttgtttcataacttagttctttggtgttttgaaaacatactttaaatgattttaatccatgtaaatttactgattttaattgagaaaattatacatatttatggtatattgcatggtgtttgatattaggattggagaaatgactaaatggaggtaactatacaatcattaccttatacacttgcagtttcgagagagtgataacactccctctaactttaaaatgcccaatgtactgttagtactcatagtcatcagggcatcattagatctctaaaacatttgaaaactgagctgttgtgagttttagactgttgactgtatcttcctatccccacaataagtccccagaggcctatgttctaattttgctttgcaccagtgtaatgtttcagattttatatgtgtataacatcattttgttgactgcataactgaactggagaccaggaagattacagacagctatttcttacagtcaagtggacagggatgtctaaggttgatggacctggacctgacagggcctttctgctaccgaaggcaacaagtaataaaatcatgatacataacagagagtggggctaaactcatctttttcctgtggcagtgaaaagtttctctggccatgatccactgatgaagacagctcacatgtatcttagtggctcagattcttagtatagtcaggaactaggtacaaagtttccaacacctgaggctttggaatacacactgtaccctaacattacattgttggtcccctgaatgtaattttcacatacaaaatattgattatattttattaaccacaaagtcttcacttactatttcacaaactcagaagctcaaaatctacagtgctgcctaaattaaatatgagacagactcaaggcacaatgcatccctgggcaaatatattttttcccatgatactgagtatcatggaaaacaaagtacttccaaaatgcaatttgagtgcagacgagaaaagatagccccatatcagaagaggaaactaaccaacaagaaaggtaaccatgcccaagtaactccaagagatgagagaagacagtattatcctacattctcagtgaaactatgtggagaaataaacagcctaggccctcatgggagatagcagcagctgtctcctctcaggctgaactgctttcacttagcatctgtatgaaactggtgcctcactcctgcaatttctcaaacctgaagttgcattttagtgacccagctctcagggcttcactgggcatcactgtatgacacctgcagtggccttgatccctcaggggtttattgagtatcttcagaccctcatttttcccttttctgtgattcattctgctagtgaagcttttcactgattttattttttattatttatttatttatttatttatttttctttgagacacagtttctctgagtaacaggcctatccatcctagaactgattttgtagaacagactgtcctggaactcacaaagctccacttgtctctgcctccagagtgctgagactaaagccatccaccaccatggcaggttctgattttatttttatttaactaaattgtaaaatttccaccttcattttattttgagtgttctctggtatttctaactctgttgacttctgttttgaaagcctggatcgtccttatgtcattcagttgcttcttggtgtcttctctgttgccaaacatttcattcccatcctcggtgaggtcattgaaatgcttatcccctatcttctgtgagcagatttatattttttttttagttcttggcccttagttttacttacattgctctcgtgtgggactgttactaaggtatctgtggctcttggcaggacagctgagcatagctggatggcagcagccagtgctttagggagtcctgaggcaagagatgacagggaatcagcaagggccctcatcatgctgagagagctacaggacagtgacaaaggacaagatgggggcttggggagtagcaagtcgtgaggtctgcaaggaacattagaggcctgcttactggccctaggggagtggctgaaagggaaattcaaagggaagcagtgattctgcagctcagcccacagccaaattgagtgttccgtgttccagaaggaaaatatctgcaaagacaaggcaactgcctgtcagtgattgactttgtgtacagtattgatgaagtcttctaaaccctgtcaggtttcctgtttaggaacctaccctctgcaagctgaataatgaaagtgctgttgagatttttttttttttttttttttttttgttttttgagacagggtttttctttggcactctctctggagaccaggctggcctcgaactcacagagatccgcctgcctctgcctcccgagtgctgggattaaaggcgtgtgccaccaacacccggcctgagattttcttttttctttacacttagtcactagcttctttgcagatgcccagactgcctttgtgtttccctatacacacagtcacagtatctttgaactatttcactttctcctctagtaatgattctagttacttaagtctttattaattttgtatgaattatattttcccaccattctaccttcatcaatctgtacttaagtatatttcttatagatattgagtggttgtgtcaactctagctttttagtgggagattggtatgtttatatttttgtattaatttactttttacattccaatccgagttccccttccctcctctcctctcattctcctcaatcctgcctcctcccatctgctctgcagagagggaaagcctccctccaggaagtctacaatgtctgttccatcatctagttgaggcaagaccaaggcacctcttcacccccacacccctgagtctaggttgggcaagatatctccccgtatagaatgggctccactaagtcagtttgtgtactagtgttagatctttgaccaactgccagtaacctcatatattgttccagtcacaccattgtcacctatattaagggagtctagtttggttttaggcaggtttcccatttgtcagacctgactcagtgatctctcactagcttgggtcagtggattctgtgggtttccccatcatggtcttgactcctttgcctgacaatgcatgtcagggtgtgctgaggatgaggtcaggatgaggaaagatagggtttaaagtgacagacaaggcaaaggggagccccttctctctggcctccctgccttgctgcccctggcacgttctggcttatgtttggctggcatttatctaataaaggatatcttaacctcactgattactaatatccctcgttagctgttggtatgattctaattaatgcccttaacaaattattcacaattttttgggtgtttgatatatatattttaacttttgtaatttctgagatacctctgggcaatctgtcttgttttcacatttctgtgacttgattttttttaatctggtattcagcaagttctctgtcatgtctcactatgtagccctgactgacctagaatctcctgtataaaccaggccggcctcaagacattgaggtccatgtgcttctccatccaaagtgttagaatttaagctttttattaaaggataatttgaaaagttttatcctttggcaatagacttttagtatgtggtttattgtgttaaattatgttgaaatatagaattaaattagttggctaactttgcacattcatggattattctaaaattaaagatagaattgtgactggctaacccagctgaaatctagcatccatatgtccatgaacaggggaaattaataggtgctttcctatgagtttcactcctacatggaatagtatatacatatataaaacacaagctcagccattacatactttattagtgttaaaatgtttctgctcaatcttttgggtttcctgaggataaacagagatactgcaaactcaatacaagatacctgagttcttatgaaggttttaatattctgatatcataagtgttacatcataagtgttacattttataatttctgatttattgtctcttcattggggtatatagaaaagcaattattctttgttgattttttcacatcatgcaccccaatatcaattacctctgagttcctccacatattcccctcacccctcaactgtcctcccccaaaaccgctggaattaattaagaacaaaacaaaacaaacaggaaatcatctttgtcttccttattttccatctcccaatcacttcctactttgtcctagtggtattgggagctgcactgtatcagacaacacacacttttgtccaatcaaccccaccaccaaattacaataagttacttgtctggttctgaagggaccagctccccattttggcagccttaacacatgcttgcctgaccttgctttggtcactaggaggtcagatgcctgccttgtggcaaggaaccaatcagaagttagctggtggtgatatgctttacggctctgggtgtgctttgcggatatgtgcacagaaatgacaagcagagcatagcaaccaccctgggagggtctatgggccataaccaccagtttatcaatcaacacagggcaggctctccaagcttggaggcacaccaatcctgagcctgtgcatacccctagacactccccttatgctgccctataagatctctgtgcaatggcttctcactgtctttcctagccatcggccatggtggatggatgaaagaactgaactaacatggggttttgaaaggttcatgctttaaggctgatcaacaatatctctttaagagacagactccaccccctgacaacagtcagggttacgctcaagaaaatgtgctatgtcatcaccatgtcacccgccacgcattacggcctgcatgaggactctgggcatgtgggaaacatcagtgcacatgcacagtcttccctttaaaagctataacttcccagtttatctttactctctaaactctctctctgcttctgcttcactctatattctcccacttacgagttctctctgcctcgctatggcgaccggccatggccatcagccattacccctgttcctcttctctcttagtctccctattctgccgggcccatataataaactagttaacatgtctcatctgcctttctcttttcctctttttctacaaaaacataacagcttgttaaactactacaataaagcctcatgctgtttgcatcaagttttctcctctacctggtgattgggttcgtcggggtcctggactgagatcctgggggcctgagcctccgggggtgtttcagataaaggcctctggcctctggtacaccatcatcatcaacagactgtcaccaaatctcctgcaatatatcctgctgttgtcccatgtcatgaggatctcatggttatctttccacaggaccagtcccttcatacactccaccaggtcatagatgggttaaatattaaggtgggccaacccaaagcccagtatatgggtctgggtagtggctgagttgggaccaccaccctcaggtaagtagaatacccatgccatctagaccagccatttcatgcctgtggtgagggatgtggctatctttcaccagtgtaggatgccagctctccagtgaagtgtggtaacatgtgccatggacgtcagctgtagtgggaccactgacccaggcattgcctttggcagaagctcaggcctgcatgctatgatggcccaggtggtagtacaagtcacccagaaatgtatgcccctccttggtggcaatatgtcccttagataccaacatgagaacaggtggctgaccagacccaagacactaacaaggccctcagtggtagcaggaatcatggacatagctaccgtattaccatgtgccggggcctggcttgtatcattcccatgctacataggcaatctgttcaggactgatgtctttggttctgtaattggagccatcagaacagcctcaggtccatccctgagtgggggtgtgtggacctgggaaaacgcctagctaccccttggcattaaggatgagatacagatacatcttgtcatctcaggagggctctcagtccatgcaggaaactggagtctctggtttattcaagcatccttttaaatagctttccaacagtgggggtcactgtagaagacatctgctcttgttagaccctcggaaactcaggtatccggggtcccaggccacgacctcagtcaccccaatcaccaggcagattagagagcttgctgcaaactgcatgaggctttactgtaaattaacaagctaaccccatgttagctcaggtcttttgtccacccaccatggcggttagctacaaaagacagtttgaaccagctgccgagaaatcttatagggcagtgtaaggggagtgtctaggggtacgcacaggctcacgattggtgtgccttcaggcttggagggcttgccctgtgttgattggccaactagttgttatggtccataggccctcccagggcggttgctttgctctgtgtgtctttgctgtgtgcttgcccgtaaagtacacccagggtcataaagcatagcgccaccagctaacttctgattgattccttgtcacgaggcaggcatgtgacctctaagtgaccaaggcaaggttatggtaagcatgtgttactgtcatggctgctgaaatggggagctggtcccttcattcccccattttcttttttggaaattccaatcatggaattgctgtttctctagcgaccccatcagggagtgagagatattggcatccccatgcaagggagtcccttctacagatttggcctagaagcatgtacaattttcttctgtccagagagccaggtatggattggcgcaattgatactaagatgtctgccagaagcagaaacctgtttaagacatgtttaaactagaaacagaggttaaaacttatttactgaagcccacagtgcagaaaaagcagatatctggatatctgttcaaacagcannnnnnnnnnnnnnnnnnnnnnnnnnnnnnnnnnnnnnnnnnnnnnnnnnnnnnnnnnnnnnnnnnnnnnnnnnnnnnnnnnnnnnnnnnnnnnnnnnnnnnnnnnnnnnnnnnnnnnnnnnnnnnnnnnnnnnnnnnnnnnnctttaagtttgtacttagatgacaaccaaaataaacttaaaaaccttgagcttgtgcctgaacagtagatagtcactattttatcagctaacatgctgactatagtctatagtggatctgactgtctgatgctgccaagttgacaatcattaatacttcagagatcttagaagggtatattctatccaaatctcctaaaagtgacagaaaccagtccatatacagttagtcatacctaagtttctccattaccgctggaggcaggtgtctcaaagaacagcaatctttgccaggcctataaggtgagaggttttttttttctctctgtggaagagggacatggaaaagactgaccttgttttgtctaggcaaagggggtgcaatcaattttccagtttcnnnnnnnnnnnnnnnnnnnnnnnnnnnnnnnnnnnnnnnnnnnnnnnnnnnnnnncttggcagaaggcagatatcacatctgagcatctcgctcactggtccaggtgcagtaactgaggtgcctcataatcttctttggagactttgggtcactgtcaggatctggcagtctgtctgatattataaactttaaagataacaatttaaatgccatattctgcagatctctgaagcattaggtctgtttggttatttgccttaagcattcaagaagcatacaggtggctaggtaaggtcttacttctgtaattaattttctgcccgactgtaactgggcagaaagtattaacttagtaaagtatttgaaaattagcacagctgaatttaagactacaaagagttaccttatagtacttaaacagtagctataggtacatattttagcagcttgctcaaatgagacagggttttctctgtggctttggaccctgtcctgcaattcgatctgccggaccaggcaggccttgaactcacaaagatccatccgcctctgcctcccgagtgctgggattaaaggcgtatgccatcaacgccctaaacttaacttctgaaaacataaactgtaacatcttataatagattagcaacttttataaaatgagaactttacattgtcaggctttgcttaaaaatgattctaaattgaagctctttaactaaaaacattaataaaaactaacattttttaaaaaactggtttaaaaaagaaatttaaattcccttaatgtctttgtgtaatatatagaagcattaacattttaaattttaactgaaaaacttgtttctaagatggtacctctaatttccatgtggtcacctttagtcaagatgacagtttaagtatcttttttcaacttcagcaaaatggctaccagtcagccatgtgaccagtttgccatgtggctggctacaaaatggaggcaacttgcaccatttatttagctacatgcttttaacagaacttaggttataccaggaaacagaacattttaaaacaagtatatataaattacatgagaaataaacaggactttttaaacaaaattagcttaatatggttaaaattttaatttatattaccatttttaaaatttactatttgtatacatgagaaaccatagcaaacagtttacaattttcacttttaacaaccttttctcagaccttctatgacttgctttaactctctataattttctatatacctttagttcattcctatgattttcttagacattcttagacaaatttcnnnnnnnnnnnnnnnnnnnnnnnnnnnnnnnnnnnnnnnnnnnnnnnnttcgtacattctcatgtctcagtcaatataaaaatttttatcaaagtcctttccataattttttttttttgaacatataaatcagaccagatagttcacccgcctgagctccatgtgctcagggaagagacctgaggtgggggtgctgctggtaaccccagaccctcggccaatgtaagggtgggaaaaagacccccgcagcccccctgtataccatgtatgtggagcacagagaaggccaggcagtcatgcagatggcggccttgcagccatgttccctcagagcatggaaactcccgaggcaggccacgacccatggcaggacggcagctggggcagagacagccccacttcgcatgcctcatagacccacaggtggggatagaaaaactcacctacatcggccaggctcagctgttagtgccacagcaattgtcaagagttcagagcagcagcctcagaggactctgccgcagcacattctaaccctaacccgtggtgtatggcagagaaagtcccgtcctgcaccacgtgctcagagcatcaagaaaagacccctgacccatgcatgccatgtgtgtgggcagtagggacaaaaagagatgttaacatagactagggtcctattcggaatttcagatggctagccccatggagatcaacttggttcgaaaccaagtctcccctatagatttcagaaggctgccacccaaacctccaccctaaacaattcttgtacgcctacttgcagattttgccagaaaccccaacataggacctccaaattcacaaaattaacagaaatagtaaaactgacacacaagcaggcggtgagggcgtggactacagcacaccagataacaaacctgctcagtcacccagcccgttctaaccctccaggcataatagccgccaacccaatgcgtctgcaccgcttataaggcaatggcgccaggaagaccggcggcagaaccaggcagctacaattgccgctaactgaggagggtccaagtgtccttggcctccgttcgttcctcctgggtgtcctcagagcagcagtctgtaatcctcctggaacatctgctgatcacagttgaggtggaatccaaggatggagtggttagtccagagacagacacaaacagcaaaaacaggatagacatcagacaagacaaaccgctaggcaaaggaatggtgccccaaaccaaaattacaaacaacccttggactnnnnnnnnnnnnnnnnnnnnnnnnnnnnnnnnnnnnnnnnnnnnnnnnnnnnnnnnnnnnnnnnnnnnnnnnnnnnnnnnnnnnnnnnnnnnnnnnnnnnnnnnnnnnnnnnnnnnnnnnnnnnnnnnnnnnnnnnnnnnnnnnnnnnnnnnnnnnnnnnnnnnnnnnnnnnnnnnnnnnnnnnnnnnnnnnnnnnnnnnnnnnnnnnnnnnnnnnnnnnnnnnnnnnnnnnnnnnnnnnnnnnnnnnnnnnnnnnnnnnnnnnnnnnnnnnnnnnnnnnnnnnnnnnnnnnnnnnnnnnnnnnnnnnnnnnnnnnnnnnnnnnnnnnnnnnnnnnnnnnnnnnnnnnnnnnnnnnnnnnnnnnnnnnnnnnnnnnnnnnnnnnnnnnnnnnnnnnnnnnnnnnnnnnnnnnnnnnnnnnnnnnnnnnnnnnnnnnnnnnnnnnnnnnnnnnnnnnnnnnnnnnnnnnnnnnnnnnnnnnnnnnnnnnnnnnnnnnnnnnnnnnnnnnnnnnnnnnnnnnnnnnnnnnnnnnnnnnnnnnnnnnnnnnnnnnnnnnnnnnnnnnnnnnnnnnnnnnnnnnnnnnnnnnnnnnnnnnnnnnnnnnnnnnnnnnnnnnnnnnnnnnnnnnnnnnnnnnnnnnnnnnnnnnnnnnnnnnnnnnnnnnnnnnnnnnnnnnnnnnnnnnnnnnnnnnnnnnnnnnnnnnnnnnnnnnnnnnnnnnnnnnnnnnnnnnnnnnnnnnnnnnnnnnnnnnnnnnnnnnnnnnnnnnnnnnnnnnnnnnnnnnnnnnnnnnnnnnnnnnnnnnnnnnnnnnnnnnnnnnnnnnnnnnnnnnnnnnnnnnnnnnnnnnnnnnnnnnnnnnnnnnnnnnnnnnnnnnnnnnnnnnnnnnnnnnnnnnnnnnnnnnnnnnnnnnnnnnnnnnnnnnnnnnnnnnnnnnnnnnnnnnnnnnnnnnnnnnnnnnnnnnnnnnnnnnnnnnnnnnnnnnnnnnnnnnnnnnnnnnnnnnnnnnnnnnnnnnnnnnnnnnnnnnnnnnnnnnnnnnnnnnnnnnnnnnnnnnnnnnnnnnnnnnnnnnnnnnnnnnnnnnnnnnnnnnnnnnnnnnnnnnnnnnnnnnnnnnnnnnnnnnnnnnnnnnnnnnnnnnnnnnnnnnnnnnnnnnnnnnnnnnnnnnnnnnnnnnnnnnnnnnnnnnnnnnnnnnnnnnnnnnnnnnnnnnnnnnnnnnnnnnnnnnnnnnnnnnnnnnnnnnnnnnnnnnnnnnnnnnnnnnnnnnnnnnnnnnnnnnnnnnnnnnnnnnnnnnnnnnnnnnnnnnnnnnnnnnnnnnnnnnnnnnnnacaaacacacacacacacacacacacacacacacacacacacacacacacacacacacgcacgcacacacacacttgaaaaaataatacctatcacaagcagaatggtgtatgagtctaggaatgataagcctgagatactctatttataagctatgatcccaggtcctgatcagaggaaggaatgaagctgtgatacagtcacactgaagtctcagtttgttttattgggggtccaaatgctatcatggccttttagtgttttgctgaacagagctaaaggtacttagcctttacaacctcttattcgcccgccaaaatgtaggctatcttatgatatgatctcaatcaagtctgaaggtaattccaggagtaatgtggctgccagctatagcattcccatagctgggaaataatatacctcaggcttgaaagagaatctgtggtacacactatagtgcccactgtcaatttctttccatccactttaactgaattttagtgatctctcttcctgggtacttttgtatttcttgactctgatttttttctctttattgctactcattacctaacatgcaatgaaattgtatttgtttatggcatatcttctactaggagatcagctccttaaggtaataaatttctgcctgtttcactctctaatattcaaattgctgcttttcacagggaaaaaaataaacaaatagtttctctgacaacagctgtggagcttggcataggcaatttctgccttcagagttctttttaaaaattgacatgatgcttgcctaagaagggactcttactagggctatgcttgtgactttagtcattcaagaactctttgttaaaatcagaaactctggaaagaatcctactactctgaaagaaatctctctgcctgtgaagaatatatcacagtcatcccagtttagagaaagattgtatttgatcaccaaataaacagaaatgaagaggctgataaccctcatgacaattagaaataattatcagtggtttcatgatttcatatctcagagtgcttagagatttattttcctaataaaagaagcagtgttgacaatgaagacatatgagacctggatttgcagacactaagttgatagagaaaaatacctttatcagatcagatgtctcaataatggggggtcaacaactctgagaagttgggcactggcaggggtcttcatagctatattgatatccagatatctgctttttctgcactgtgggcttcagtaaataagttttaacctctgttcctagtttaaacatgtcttaaacaggtttctgcttctggctgacatctgagtatcagttgctaactacaggctgttctaagtagactgcgagccctaaacttgctgtggatgtgaaccagtctgctgatatggacaccccctatctctgcaacaannnnnnnnnnnnnnnnnnnnnnnnnnnnnnnnnnnnnnnnnnnnnnnnnnnnnnnnnnnnnnnnnnnnnnnnnnnnnnnnnnnnnnnnnnnnnnnnnnnnnnnnnnnnnnnnnnnnnnnnnnnnnnnnnnnnnnnnnnnnnnnnnnnnnnnnnnnnnnnnnnnnnnnnnnnnnnnnnnnnnnnnnnnnnnnnnnnnnnnnnnnnnnnnnnnnnnnnnnnnnnnnnnnnnnnnnnnnnnnnnnnnnnnnnnnnnnnnnnnnnnnnnnnnnnnnnnnnnnnnnnnnnnnnnnnnnnnnnnnnnnnnnnnnnnnnnnnnnnnnnnnnnnnnnnnnnnnnnnnnnnnnnnnnnnnnnnnnnnnnnnnnnnnnnnnnnnnnnnnnnnnnnnnnnnnnnnnnnnnnnnnnnnnnnnnnnnnnnnnnnnnnnnnnnnnnnnnnnnnnnnnnnnnnnnnnnnnnnnnnnnnnnnnnnnnnnnnnnnnnnnnnnnnnnnnnnnnnnnnnnnnnnnnnnnnnnnnnnnnnnnnnnnnnnnnnnnnnnnnnnnnnnnnnnnnnnnnnnnnnnnnnnnnnnnnnnnnnnnnnnnnnnnnnnnnnnnnnnnnnnnnnnnnnnnnnnnnnnnnnnnnnnnnnnnnnnnnnnnnnnnnnnnnnnnnnnnnnnnnnnnnnnnnnnnnnnnnnnnnnnnnnnnnnnnnnnnnnnnnnnnnnnnnnnnnnnnnnnnnnnnnnnnnnnnnnnnnnnnnnnnnnnnnnnnnnnnnnnnnnnnnnnnnnnnnnnnnnnnnnnnnnnnnnnnnnnnnnnnnnnnnnnnnnnnnnnnnnnnnnnnnnnnnnnnnnnnnnnnnnnnnnnnnnnnnnnnnnnnnnnnnnnnnnnnnnnnnnnnnnnnnnnnnnnnnnnnnnnnnnnnnnnnnnnnnnnnnnnnnnnnnnnnnnnnnnnnnnccccccccatggggaacctccgtcccaaggtcagccatctggacgcggaggggggaattgggtctgttgtaccaggtgcagaccttgagaatatactgataactctgtacctcattaaattgtccaatagaatccctgtaactatgctttcgcttctgcactgtgctttttagctatataaggacccctctcccttggctcggggcttagcctacccaaaagctaagccccggggtaccagcgctactaataaagcctcttgctcttacatccagagttcgtggtttcgctgattcctgggtgcgggtctcctacgaaagtacctcttctgaggtctttcaccagaacacatctgctttccctatggtccaaatcaaacgacactcagactttcatccaaagcgggatctctgggtcttgaaacatgcctgtttccccctgaggtccaaattacaaattcaaataccagtacaaattacaaatatgagtcctgtgcaggttcagatcaaattcaagtcatagcaccaaaccaacaaaacagcaagagacataacaagcaaacatgtaacattgaacatataagtttcgagctcgaatcatcttacctccaagatcgaatccactcaggtgaggagtggtcccaaatcaaggacaagcccacaaatgtgaccaaagcaaggttatggcaagcacgtgttactgtcatggctgccgaaatggggagctagtcccttcactctcattgtataaagctgatatcaaaaaattcttttaatcctagaggcaaacctaaacagaccctaggcaggtaaacaaagctctcagaacaggtgtgggcacacccaaggcctagatctgttgttatgcaaagtaggagacattctccactgagaccaagccatccagcagtaattcgccagacatctgaaagacaatgggagattcaggctcctgaaaatagagtgaaggtttgcacccagacaaccatggatgcagacatggcccacagcagcagccacaggcccaacggacaccatggccctatgtggtaatgcaggctactctgatcagcatagccccagcagtgacatggtcctcaaacaccagcatggacacaggttacagcctagatcatccatgtgacctttggtggcaacatgagtcatggacgtcaacacagactgttgctatgctaggaccatgtacccagacacagtgcttagcagcatccctggctcagaagttaccatggccccaggtggcaactgagggcactcagatatattattgaaggacttaaaaattagcaaagaaataaaataaggagacttagaaaaacctcccacactaaaagcagggtggcctgacttaaaaatctaaccaaagtcacaatgacccgagtccctggaatttcctagctgcagcaataactcccttacaaggccacaagatagcttaactaaataccaagactttccagcaggccaccctgccctggggtcatgaagataagaacagactatcccactgtgtcaggagaccatccggccccaaagataagagacctccaaaggacctatgactcggtcatgtacccaaaccccctcccctccctaaaagcttgtggtttcctcctataaaagaggcctgcttttgaggaatggggcttcctttgtctgttggtctgggaggcctatttgtgcaaacatcctgcaataaacttacctcttgtttttacatcagctggactggacattgagattttttgggggaccgtctgatttgtggagactcctcgatctgagggtctttcaatatggctcctactgcaacatgaccctcctgtcctcaggtgatagtcaagtcttcaggtatttgcatagcctttggtggtaacatgaatcatagatatcaaaatagacccttgatgcagaaggaccatggacccagacatgaccatatgccacagcctgggagcagatgtcaccatggcctgaaggaggggaggtagcacagcccccagataccaacattgattcagatggctgatccacatgcccttcagtggacatcagcatagacctacctacactgctatatggtcacagactcagacatagccttggcagcagctctggtctagatgtcatcatgtcaccaagtagcagcacaggctaaccatatcagcatgatcctagcaatggcatggccctcaagcaccaccatggccacaggtgaaagctaggactccaggcattcttgtggcctgtgtgaaaggggaaaattaatgaatgtctaaaacccagattccaaagcccaaaaagaaaactctgagttcccaaaaaggcagctcagcagacaaggttaaacaaaggtccacaggactcaagcccttagaccagatatcacacccttgaatagtgtccacattcctttggtccaaagagaatcagatagttatcaatagtagaagtccccagcccaggagacaattaacaaactcgtttcctctgcagcatcctgcttaattgcaccttgcccaaaacatacaatctttgtcctgtcctctgtaaccatggaagttttgtaatcttggggcttccagccctacaattttgccttgtaaaaacacccctcagtagaaagtgggtactccatctgttcctgaacaatggggtcttgctgcagctcatattcttgagtcaataaagaaaactttgccttgcattcgatgagtcatctccttgctggtgggttcttttggggttccgaaatctgggcacaacactttgttggtaacatgggttatggatgtcaacagagacccctgctgtggtagaatcatggacagacacatagctcttggcagcagcctgggcccagatatcatcctggccccaggtggcaaatagtccactaatgtcagcttgtttttcaattcttcagttcctcctctttctacagcacatgaacaattctgcttctcttcctttcctatttctccaccacatattttctcatcataatggcatctgccaacctggtgctgcaaggactataatgacccagactggcccatgggtgtcctttatccacctgtgctgagtggcacaagatgggctccacagcagcacttataaaagaaaccatttcagtggggcttgcttacagttcaaaaacttagtttattatcagtgtggcaggaagcatggcaggaagcatggtgacatacaggcagacatgatgctaaagaaatagcagggagttctacatccaggtccacaaatagcaggaagatagagaggcactgggcctggctagagaattggtcattattctataccaattgactatttatccagataatttgaaacaaaatagataaattgatataatttatcagttgacagttgtaaattttctgtgccagataatatttaagattaataaaaacaaatttccttcatgaatcttatgtttcatttttttcttcctttcttgaccaaagactcatgtatagtgttaaatagaattggtgaagacaaataattttgatttattattattctctaaacaaagcttttattatcatataaactattatatttgttgattctatatttgtatattctatcagaataatatatcgattttccctagtttatgaagaattgtttacatcattcattttagttgtaatttatcaagaatatttaattatggacttccttcctaattggattgttataaaataacagattcttaacttaatcatctgagaattgttgacatttaaatcaattgaaatgaatgtgtgctctgtactagatgattgcgatttctttccaattgctcatggttgttaattatcttcttcagacacaatggatttttctataatatctacttgtgatatttctctgtgttatatttgaaactatcttaatgattcatttaaactttgctgccctgacagtaagaactgaggcatctttctgggttggcacagttactctgtgttctgcctcacatcttactctgtaactgtgagaatcactgtctttacaccaatctcttttcttatgaacgctggttcttgtaaggatggtatgaaattttctttttaaacacaagtctaggcaaagtttgacatcaactgatttttgtgagtttattttgtatacagttacttggatgaaagtgtttatcagctgttggagattccccttgaaacttttagggacacctatgtattctatcaaatcatctgccaataaagattctttacaatttgtatctccttgatctccttcagcccttttgttgctctatagaagacttcaagtactatattgaatatgtctggaaagggaggccaaaattgtttttttttcatgattttaacagagttattttcagcttctctccatttaagtatatattggctataagatttttgcaaactgattttattatgttgagaaatgtccttggtatccctaatctctctaagaatttcattgtgaaaatgttttccaattgcacatctgaaatattattattatgttctactatcagctttgacattttctctattacttttactccttaatgatgtttccatgtgaacataaggacttcccctcttgtgcacagctcagattattggcaagcctctacagcaaagggcatacagtgttctagtgtgacactcccctacttgattattggatttgacacaagatttcagaaacatgtgttctttgttacttatctattactgttacaaaatgctatgaccaaggcaactcataaaataaaatatttgattagagctcatggttcctgatagttagagtcattgtgattgatctatagttgacaacttacatctgctctaaaagtaaaagccacagatggagagataactgggaattacatggtcttttgaacactcaaagcccacccccagtaatacccccccaaacaagggcatatctccttaactttcccaaacagctacaccagttggagacaaagcattcaaacatgtgtgcctctgggaaccattcttattcaaacaaacacaggtgtttctcagttgatgcatttttaaaacaaacactactcacagggttctaacatgactgcaacactgaattactgcaaaaaccatgagagaattggatcagcgtttcattgctatatcctaatttgctattttctgtacactgcaccaaataactaaaactagagtaaggagcagtgtccaacatctactgctattaaattaatcatcaaataagataaggccctcaaagcatttatctgtctgtcatctatctgtctgtctgtctattgatctatctatctatctatctatctatctatctatctatctatctatcatccatataaatatcttcatttatagagatgtggttagatagcttggttttcagccaacggtattatttgagatggttccagaaccattaggagtgtggcccacttaaagaaagtgtctggtactgagtgtactctttctatcctttcttgtatgctgcaaggtggaaaccttcttctctacatgcctgttgtgaagtattattttaaggtgtgttacatttgtttatgctgtgaaacatttgtttaatgatgcaaatatatgttgcattctttaacattgcatttgtataactatgtgaaactgtatttctgtaactgtctaaaacaacccattggtctaataaagagctgaatagctaacagcaagtaaggagaaaggattaggcagagaggaaaaaataggagaaatctgggaagaggcatcaaggagtgagaaaagaaggggccagaaacacagacacacacccacacagccagacaggaaagaagaaagatgggttgggagagattggtggggaacatgggaggataggagggcaagggaatgagggggatagatatgtaaatatgagtagtaattaaagaatttaaattaaaagaaaaaattccgcttagatgtcctcatattatagcagcagttattcgtggtggtatgttaactatttggtacatgaaaatgttttgagctctacattaataagaaacctccagatcaaaacacaaatatacagaaatagaaaaaggtaaaaacacagagacaaaaggtagagaggataattcaagttaagaaaagctggcaagagaaaagccgaattgacgtttggcatttatgagaaagagcaagcccccatgtatgacctatttgggagttgcaagttgccccccccaaagagtaaagagcaaagaaagtaaaataaaaaacaaacaaacaaaaaccaatggcaacaatgcactggcctctgtttacatggtatacttctacaccacacacacacaggacataagaatggtgcctctaaaattgagctgaaatatacccctcatcaagtatttttgtcactgtaatatggaacctgactaacacagagggtgagtgctggggaagggcacagttcctgtgactaaacctcatggttttaaagctttggaccttagttgaaggaataatttggaaggggtgaaagaaacagcagtaataagggtgtggcaacaactctgtggatttttctggtaggagctcagcagagcaaaacaccaaccagaatggaagataaagaagggatccatacagtgtcagaatcagaacttcttgggcatcagacccaagcacactactgtactttgtatactgaaatataagggaggctgatttttaagcaatggatgaattaatcaggctgaaaacatgttgaaacagcccagcaatccagcatatgtgtattgctggctgctctttgatagatttacagcgagaatttgtggcaaaaaggtttacaaaatgtgtgctttggtaataaaggaatggggttaaagctggagtccattccaaatagacagatattctcccagcctagacatatggaagagggtcttggccctgctccaaatgatatggcagattttaagatcccccatggaaggcctcaccctccctggagagcagaaaggggatgggttagggggttggtgggggcaagggaggaggagagggagaaggaactgggattgacatataaaacaagattgtttctaatttaaatttaaaaatagaggaggaaaaaaatggaagtttctaaagagattatcacacataaaccaatcattttccatggggacaataggaaaggcactattttataaaatgaccataaccaacacacaacagtctaaatggcatagaaaaatggacttattggaatggccttcatggatctcctggcctgggaactacaggctggtctactcacccccattggatcaagcaatcttgagtctgctgatatcgctgtgctactcctgtcctcactcaggggagaggtgagcttaggctcttgtctcaggcctgacttctgcttgcccactctggaatttattggcttggagactgaaggaaattcaagttgtccccagaggaccaagcaacagcaagtctgctgacattgctgtgctagtcccactctcatccatcagttgagggagtgtctcagacccacctgcagccacccatcagattattggacctgcttgcccccactggaagagaaccttggaccagtaaccaccagaagagaaagagacagagataccaactgcagccactggaagaaaggataggaagacaacaatataagaacacattcaacaacagaaaaaccaatatgacatgacatcaccagagtctagggactctacaccagcaacacagataaaacaaaagagaacaaccttaaaaacaacttcaacatgatgatggaaaccctaaaagagaaaataagaaaattcttttaataaatggaagaaaagacaaaccaaaaattgcaagaaacaatgcaaacagtgcaaggtttgaaagcagaaatagagacaataaaaaagcaatctgaggaaatgctggaaatagaaaagatgggcaaatgatgaggaactaaagatgcaagcataaaaaacagaatacaagagatggaagagagaatctcaggcattgaagatacactaggagaaacagattatcaaacaaagtaaatcttaagaccaacaaattcttaccacaaactatccaggaaatatgggacaccatgaacaggccaaacctaagaatattaagtatagaagaaggtgaagaaacccaactcaaaggtgcagaaaacatattcaacaaaatcacagaagaaaacgttcccaacctcaagaaagacattccaatgaaagtgcaagaagcctacagaacaccaaacagactggaccacaaaaaaattccctcccacataatattcaaaacaccaaacatagagaataaagaaagcttgttaagagcatcaaaggaaaaatgtcaagttacatataaagacaaacctaccagaattacacctgctttttccatggaaatcctcaaagccagaaggtcctggatagacattctaccaacactaagagaccatggattctagcccagactgctatacccagcaaagctttcagtcactatagatggagaaaataagatatttcatgacaaaaccagatttaaacattacacatccaacaatccagacctacagaaagtactggaaggaaagcttcaaactaaggaagttaactacactcacaaaaacatagtgatgacccaattgtgtttaacagatatctataaaacattccatccaaacacaaaagaatatatcttcttctcagggccacatgtaaccttctctaaaatccaccacctactcagcaacagagcaaacctcaaaaggttaaaaaaattgcaataaccccctctatcttatcagaccaccatgctttaaagttagaattcaacaacacaaatgcagaattccagaaactcatggaaattgaacaaggttcgattgcaccattcctgggtcaaggaagaaataaagaaagaaattaaagactacctagaattcaatgaaaatgaagacacaacatacccaaagtcatgggacactttaaagcagtgctaagaggaaagttcacagcactaagtgcccacacgaagaaactggagaatagtcacactagagaattaacagctcacatgaaagctctagaagtaaatgaagcaaactcacccagaaacaaataatcaaatttagggctgaaaataataaagtagaaacaaagaaaacaatacaaagtatcaatgtaacaaaagtaggtacttccagaagatcaacaagatagacaaacctttatccaaactaacaaaagacagaacatgcaaattaacaaaatcagaaatgaaaaagggacataacaactgacacaactgacactgaggaaatccagagaatcttcaggtcatattttgaaaacctgtactacataaaaatcgaaaatttaaaggaaatggacaattttctggatagatatcatttaccagtattaaatcagataagcaattgaaatagacctataaaccctaataaaacaaaagcagtcatcaaaagtctctcaaccccccccaaaaaggctagggccagatgtattcagtgcagaattctatcagaaattcaaagaagagctaagaccaataatctccaaattgttccacacaatagaagcagaaggttcattgccaaactctttttgaggctacaattaacttggtactcaagcaacataaagacacaactaagacaaagtactacagaccaatatccttcatgaacatcgatacagtaaaactcaacaaaatactggcaaatcaaatccaagaatacttcagagaaatcatctaccatgatcaaatagacttcatcccagagatgcagggatggttcaacatacaaaaatctgtcaatgtagtccacaatataaacaaaccgaaaaagaaaaaccacatgatcatctcactagaagctaaaaagaccttagacaaaatccaacatcccttcatgataaaggttctggagagatcagggataacaggaacatacctgaaaataataaaagcaatatacagcaaaccaacagccaacatcaaactaaatggagagaaattcaatgtaattcctctaaacttaggaacaagacaagtctgtccactctctccatatctcttcaatattgtacttgaagttataactagagcaataagacaacaaaaggagatcaaggagatacaatttggaaaagaagaagtcaaactttcactatttgcagatgatgtgatagtttacatgagtgtcctgaaaaaagggaactcctacagctgacaatcaccttcagtaaaatggaaggatacaagattaactcaaaaaaatcagtagccctactatatacaaatgataaatagactgagaaagaaatcagaaacattgccctttacaattgccacacacaacaaataatatcttggggaatgctaaccaaacaattgaaagacctgcatagcaagaactttgagtctttatagaaagaaattaaagaagataccagaaaatggaaagatctcccatgctctttgataggtaggatcaacatagtaaaaaatggcaatcttgccaaaagctatctacagattcagtgcaatccccatcaaaatccaagcacaattcttcacagatcttcaaagaataatactcaacttcatattgaaaaacaaaagacccaggatagccaaaacaacactgtacaataaaggaactcctggagagaccaccatccctgacttcaagctctattacagagccttagccctgcaaactgcttggtattggcacaaaaacagacaggtagaccaatggaattgaattgaaaaccctgatattaattcacatacctaggaacacctgagttttgacagaagctaaatttatacaacggaaaaaagaaagcgtcttcaacaaatggtgctgtcataactggatactgacacgtagaagattgcagataaattcatatttattttcaggcacaaaagttaagtccaaatgcatcaaagacctcaacataaatccagctacactgaaactcttagaagagaaagtgggaagtacccttgaaggaactggtacttgagactgcttcctgaacctaataccagtagcacagacactgagaactacaattaataaatgggacctctttgttggagaaaaggagaaaaaggaaagctcgaggagacgctgccaccgcagccaatggagactggattcgttccaacaatctgttaaaacatggtggattactatgaagatctgggcatgcagagacatgcctcaactgaggacattaaaaaggcatatcagaaacaggcacttaaatggcatcctgacaaaattcctgaaaaagaagaggcagagcagaaattcaaacaagtagctaaggcatatgacgtgttatcagatgcaaaaaagggggacatccatgacaaatacggcaaagaaggattaaatggtggtggaggaggaggtggaagtcattttgacagtccatttgagtttgacttcacattacagaatcccgatgatgtcttcagggaattttttggtggaagggactcgttttcatttgacttctttgaagacccatttgatgacttttttggggggaaccgaaggagttcccgaggaaatagaaaccgaggtgcaggctcgtttttctctgccttcagtggatttccttcttttggaggtggatttcctgtttttgatacaggattcactttgtttgggtcacggacatgagggtctcacttcattctcttcagcatcatttggtggcagtggcaagggcaacttcaaattaataacaactcctaataagattgttaatggcagaaaaatcactacaaagagaattgtggagaatggtcaagaaaaagtagaagttgaagaagatggacagttaaagtccttggcgataaatggtaaggagcaccttctatgcttggataacaaataattcaacgccacatttcacagaaatgttaaaaccataaccagcaccatttgaggaaaaacagaaacctttttgaagatttcaaatgaactcgacttctgtataactatacctaaagtatttataaaacagctcattggagcccctatttgtcatagacttttgagttcattgttggggctacaaaataggaccatttttttgtctttaaaattgttgtaatctctgtatgcactttgctttaaacaaaacaagacgtaatctgaggtgagccctgtgactcttaaatagtgctaggacaagattgttctttgacaccagcctggatctgcttcccattgtgttgaaacgtgagtaagtaatatcaacctgctgtgacgttaacattgccagatgaagcttctacagaaatatttcaattttatcttcagtatttagtaacaaaactattactgcatcaatggcaacaaatgtgttaattaacgatgttttctagttgtgcatagatgctggcaaaatcatcagttctgacaattgtttaaatatgtaatgttaagcttaggtttaaaaaaatctggtaatttgggtttttgtcatttgcttaaataaagaaaataaatgtgaatgtgtttggtgcaaaaataaattacataaataaataaataaataaataaataaataaataggacctcctgaaactgagaagcttctgtaaggcaaatgacacagtcaataagacaaaatggcagcccacagactgggaaaagatattctccaaccccacatctgacagagggctaatctctaaaatttacaaagaactcaagaagctagtcaccaaaacaccaaacaaggcaattaaaaagcagggtatagaactaaatagagaatactcaatagtggagtctaaaatgcctgatagacacttatgaaagtgctcaacattcttagccataagggaaatgcaaatcaaaacaactctgagataccattttacttttgtcagaatgtctaaaaccataaacaccaacaacagtttatgctggagaggatgtggagaaagaggaccattccttaaacaccaacaacagtttatgctggagaggatgtggagaaagaggaccattccttaaacaccaacaacagtttatgctggagaggatgtggagaaagaggaccattcctccattgctggtaagagtcccaacttgtacagccatttggaaatcaatatggcagttcctcaggaaaatttggaatcaatctaccatgagatccagcaattttactcttaggcatagacccaaaagattcatacaacaaggacatctgttcatccatcttcatagcagcattatttgtaaaaggcagaacatggaaccaacctagatacctctcaactgaagaatgaatagagaaaatgtggtacatttacacaatggatcactattcatcagaaaaaaaaatggaatcttgaaatttgcaggaaatagatggaactattagaagccatcttgagtgaggtaacccagtcacaaaatatagatcagtatttgtctttagtatacaaatgaactttgtgagctcattccacatggagggatactctctgaacctagacacatgggggagcgcctaggccctgttccaaatgatgtgacagactttgaagttccccacagaaggcctcaccctccctggagagtaaaaaggggatgggataggtggttattaggaggcaggggaggagaggagggagagggaactgggatggacatgtaaaacaagcttgttagtgatttaaatgaaaaaatctggaaaaaaagcttgacaaaaacaaaaaacaaataaacaaacaaaaaagaatggccttcatctgggaatacagagcctccaacaggttctactcccacacaacagtgtttcccaaatatacttccaccaggatcaactcaccaggtgtctatagtcctctcttagccactgttcattctattggcagattctggtatagacaggtggtgttttgtcagacatgccaaatgcaagaactctgatatcaggagggttctattcaagtttcaaagtaagagcctatagaccaggcactgtatgccaggataggatctctgtaagaagtcctggcaagtggtttcctaaagttgtatggatgaagccttaagctctcgtggacaaatcagagtgctggagatgtatgggtgtggaatatctgttgaggaaagtcactggcaatcagaagcatgtgagaaaccacatgtgctgtgagtgcaagagctgatgacacttccaaacatattgaagctatctcatgacatcccatgtcttctatgctgcatgtaaaggagacagaatgctttcattctacagcttatgtcttgctctgaagctgtaccttcttcccttattcctagtccccacttaataaggaagggttttcactatgtcactgtatcttaaagagaccaaagcacactgtcaagaccatgacacaaaagggcacatgtgcacttcatacatgtagggagtgatctatatgaacacactgctcaggatgtgtttactagaaattaaacttcagtcttggtgtcatgaaaatgattgttctcaaacactccccagctacagaggacagatgatgaggaggaaagcacctgtgccaatcttaaaaaggagactgactacatgagagaagtgaaatttttaaatgcttgcctacctttgttttccctcctgtataacccgctggctaaaaatacatgcaagagaggtatttgccaagatctcggtgtggaaatagggacacgatgctctgatttgtatatgaaatgcttataggatattatatcatttattttctgccattgatgctattggggtgaaacactaggaaatttagatgggaaatttcttcttgtggaagaaaccaagtcaattgtgtcctgctttcaaacatcccttaccaattccatgttttcattgtgggattgtgtaattatttccccctcacaattctaacacttttctcatgaaacaaaatatacaacatttgaacgagcaactagatagtgcttctggccatctttttaaagcaaatgcaaaatatgctttcataaggctcattttgtcaatatctcattataagtgctaaggttatgataaaaggcaactcaataaaggagagtgtgcatagtaatgagataacagggtgtccactcctaatatagaaagtctacagattccaaccacatatcttttgtttgagaaattgcatcaggtgaactatgtcatatctagcagattcattggaagaggagtgaaagctttagaaaaacatgtagtgagtgccactcctatactaacactaaagagtacctgggggtgacaaagagaggaaggtgtataatggacaaatcatttacagactttaaatggtaagtttcaacctgactaaataaatgagttatcctgaaagatatttccccctcacagaatgaaagccaaaacattttattatgattatttacaaagtaatttggaataggaagcatatttacacttgtatttgcttttgaaattaatcactgaccttgaagttaaaaatgggttgaaatgcttgaattttaattgtgaattctcccctgagctgtgtcttagcaatgtcagttctctttttcaaagcctctaaaatactgtaattttccatttgtttacataaatcaggacttcttaggcattttctagttttaattgtcttgtgcccattgaagatttacattgggtatgtaggtacataaaatacaaatgcaaataaaatttttgctcacaatgaatcaaacaatttttagtttaaaacaattcagtataggtatgattttatgccttaatacactaaagtcaaatttgcattctggatagagagatgtgcttgttatttttatggaaaaaatattggctgagtatttattactatggcaaacagagcatattcaatgcttttaggagttgattgatatttttgatttattctttttagggccatttcagaaattgctagtaattatttaccaatcataagccaaaattcatttaacattttttgaaaaactaaagtcaaccactcaaacaattacataatctacaagtataatacagaacactcaaaaaacataataattttatatttccatgcaaaggagtgacaatagaaaacaagttgtcttatatatttataattaaactattatgttcttctataaagtctttctgcctttgtaaaagtgggaaaattgtagctgagaacacactagtctaaatagttgctggttgtgtggggtgataggatatgcaatctatagtgcccaccctgaatgtccagaaacaatacaccagaaacaacactgttagatttttgtttaaattagaaataaagaaagagaggaggaagagacaaaagactattagacatattaagcactttattataggcccagcagagtagagagactaagagagaagaggaatgtggttaatggctgacccccatggccagtcaccatagagagagagagagaagacaagcagaagcatacagagaagaggagaagaggagagagaaaacaaaaatctaacaaacatgactcatgaattaattttggctttagttatgactattgaatacagaaagattttcttcttgcaaaaattttcatgactttggcatttagtatgtacatttcaattttattttcactagaataaaatcttaaaaaacttagactgtgtgtatgcatacacaccttgtgcccttccacagaaacaatgggagctagaagagatgtcactctagttcacatgagctcctgaggacacagaaaggtgtcatgcggccccagacagctacacagaagacagtgtttagtacatcaaaaggggacagaggattagaactgaaaattcctgctagctccaaaaccagggtctcaaggcatgaatatgaaatttttctatgtgaaaaatataagataattagttgcttaatttagctgcttcttctgcattactttcattctgacaaagaaaagcttgtttttttccattgagaaataacattcctcaaattaaataatcagaatcagatgaggttgacctacttcatggctcctgactattgggcagcctctgtatcccaaaaatcaccaatcagagtgttacactctgcaaccacagagcatgattcaaacagggcaatgggatctgggaaatataaatgggagtcatttctcaaattcctttggaactaatgtaaaagagactatttgcttccattaatgatgccagtggttgaaagggcttctaaggagggaaatcatgcctgaaatgaacctaacagggtgtaaaggagaaatgaaaaggagaaaagaaaataccatcaaaatattaattgtcagtacagtaatatctcccgtagaaatttctgccttcccaattatttttctcttgtttaagtcgatttgagcttgactttgggattacccgacagcatagtgtcaagagaagattaatgtcactaagtttttctcattgcttaattactgaataaatttgacagtaccttgaagaaactcaagagtgtgatgtctgtgaagagaaagcttctcagagaactttccagatggagctatccactaggtcatgggaattaatctggcacactgccaaatagccaaagaaacatgacttccaaaagtggagatgatgagtttccctctgctgattctgcattggctttctgttttcaacatctcttctgtggaacaagagttaagagacatggtcagctagatgcttagtgatgactgagtccttctggctgactccttttgtggcttgaaaccattttgctggcagagataaaaaaaatgacttttaattgctaatctctaaactccatgaagtttgggtataaatttttgctctgagaaatggggaaaaaacttgatatatttctaacattataactaaggtactctattttgtgctgagaatataacaatgagaagaaaataggaattttctaagcaggtgtggttacagtagtgtctgctgtagttatttgggtttaggcatctaactatgtgctgtgaactacttttgcttgagttaaataagtacggctctttgatttatgatggagtactaaagattaggcacagactcctgttatatatacgtagtcatttcatcacaacatagataaattgatgctcatacatatagttctagtaacaaatataaaaagatgaacagagatggagtggatgtcaaaagtgaaaagtaacaaatgtccataacagcctagaaaaagtcatgagacacctctgggtagggttgataacctcagtatttcaagcatagatcatgtgttacagaaacagtgggtctagtgttggtgcaagaaattggaatttgatcttgtgaacatcctgtgcacctaatcatacacactggaaagcgagatgttgtgaatcaaagttgttgttcagataaactaaagattttgagaaaactaaatttgttagattatttattatgtcattttatctaagcagtatttcaaattatgttattaatcgactgaccagacatctcagagcttgtattctagtgaatggaacagattatgtgttatagaatgacatctggtgtatatcagtaatagaagaaaatacaggatgagacaagaggaaaggtggaggaagcagaggccatggtagggctcagcaaagtcacatgattagctgggttttaaattgacccggtttgcctttcagtttctgctgatgcaaaccatatcattgtgtggtggtgaaatgatgcaaataagcattcaactcagtttcctgtcctttatatttcactacattggtgtcagatataaatgatttggagatgataggtgccattcttggaatctgtcttaaaattcttagcaagtaccctatatatctgcaatcatttcaaaataaatttcaaattttaacattttggtgaaaggattcaagaataaatgcaggaaggtcaacaggttgatacaataaagtacatgagacaatggtgacttataccagtgcatcattttagatgttttaaggacagtttgaaagtgatgtgatttgggggatcaggagacaaaagagttattatgcacaggaaaaatgtctttagaaattcttactaaaaggattgttttagaatctcaaaaccaaatattcaactcattaaaaataagtagaagaaaaaacatgagtaaaatgcaactaaacacagtcagttgcagtacttcagggagaggaagtaaagcatcctaaaggggaaatgactgtgaaaacctactctcaaagtgaagatgctttgattttagagtgaacttttttgagagttgaatgtcacagaaatttaatttatgagggacaccatttgaaaacaaagttattgagaaaagtgattatcagttcacagagaaccttaaactgctccaatggtcacagaatatcaagctaaggatgataatgaaaactattcaacaaacagtaagttcactgtgtagttctttccttgcttcagtgttttttgttttttttttcacttttttatctttatttcttttgtaagaaatacatacttaggattacactatttcctctgaattgaagcattgtatcctggatgaaggcccttcaggcccatgaagaaaatattgaaactcatgacattcaccaagtttcctcctctgcaaggttacacaaggaatggcacctgctggagaaaagagatgctagggtccacaggcaatgttcaaatcctcgaggagctcacagcttatatcttcagtgccatctcacccattgtagggtcatctagagtccttgggattacccaccctgttgtaactaaccacagcaaacacacaagttcagaaaactatatcttggtgccttgtactgtatgagttcagtttgcaacaagcacttggtgtattagtattttgtttatctgaacaaatatggaaaggaaactaacacattaagtgatgatactcactgttatcctgacatggagataaagattcagaatttcacaactcatctatacttataatacaaagcattaaggaaagtgcacctggcttacacagcatcctttcactgtgtaatgacactaaaaatttccagggtgatagaaacatcactgatgcaattcctagctaactgtcaagctgttgatcttcaagccacattatccatttcctgcataaatttaaggagtgatactaaaggaaaaatatgttggtaggttttagaacaacgagcaggttttatgtcactggtatctctcataaagctattcacttatttgtgtgtgctagaatgctccacgctcctgacctcaatttatctggtaggtagctatgaatcattagtgcattttaatccactttagatcaggatttgatgatagtgatctgagcattttgtgtataacctaaaatactatgaatctcttgatagccaagtaaagtgtttgtttcaagcaagaaaccagaattgcaattcttgtttatcaaaggggagcccactcctatatctactggcaaagtctttaaattgggtaggaaataagagtgtcaacaagctgggcccttgtaagtcacagggtcaagaagcaattgttttctattcagaaatgaatttgtctttctaatgtctagagtctaagatctatcaaggtttgtcttgaatatatcagagttaaaataatgtactctatagaatttattatcatctgtctctctatctttgttcctgtctttatcccctttacacccctcacatgaccagactggcctgcatttctgttgtgtatgagggtggctgtcaacttctgacccttcctcctctacctcccaagagaaaggtgacataatttgcattttcacaaaaatattgtctggaaaggctctcttccttctcttatttttacacttctctacatctatccactttcatattctttaaaattttatctcttcataaccagctaacagctcttattctgactccacagttgttgaaacctttaattaaactaaaatgaacaagtcattaatttgaaaacaccaaaacaaataggatgacttttacttaactccagaattttcccttttgtattttaatttctatttatatatttaatatttgtttctttttgagacagagagacacagtgtaggttatgctatcctggaattcactatgtagcttagactgtccttgaattcaaggtgatattcctgcctcttcccacaaatgttttcccagttaccagtgtatggctacacacccagctttcccattctattgctagtatttagaacaagctacatccatgacttgaaggttttctttgatataaatttagctacaacaattatcaatggactatcaaattgctcataacagaataatacccagtgtgtgcattcctctttagtgtatttaattcactaatattttattggacttttatctattttgattttgtagcattctttaatctattgtcaatttttatttgaaatcctctggggagaacatactgcagttcattcagcaatgctgtttttaaccagtccttttcagtctcttcactcttgtagagaacttttccataaacacgattgtatatgtttcttggaaacttccttgagtttttcttgtttttatgggatgtacatgtccaacttttgtacttactgtcaaaccatcttcaatttgtattgttttcaaatgtatgaatagactccattatcatgtttagttttacaatttttcatttctatctgatatgtatgaggtgtgacttgacatctttgatttttattggaatatgtggattttaatgattattaatttgatatgctctagatttctaaaaatgtatctagaattttcttatctctgccgattttaataaagttttgataggtagaaattgttaacatagtctgaatttttcttcattgtcaacatttttaaaaacagctttctctcttctattgtctcttccctgtctttaaaatatttggggatttaaggaatttttaattggatttattttttctgcctattttaaggaattttcccacactgaagggaagaaaattgtatttagagtataattttaaatttcctgtttgggaagtttccatgaattattctagtacaaaggacattccattctgtgtatagaatgaggtgagaatccactcccatttcacttgtggatgtcagagttccccacataaccatttacaaggctttagagttgtttctgcagcaaaacttactgcttacagactgcttatatttgacttctacacatcctctgatgtgaaaccaagttaccaagtattttttatagtgacttgtcaggagcagcttgcatagcatgctattaactcccgaactgaaactcttatggtgggatcccaggatgtctctgcagtatgaaagttactgctaaataccagagaagtggggatgtgtagttaggaactgagtggaatgtaactgaggagatgatgttattaaaggcatgtactctagtgagttataatctcagtgagctttgctacctttgtctgatggatgtccatgctaatatcaatcatgtgcattgtaaggaaggctttaggataaaacaaagaaaatgtgacagaaattttcttaagtacagtcaggtatagtggtgctctcctgtatttcacttcccagtctcatccaattggacaggtatcagcatccagtattaccatttatcaaggggttgattaaactgtttgccttgctgaatacttctcacatagtattccataaaatacttgttactattgcttcatgaatgagccctgtgagattgccggagtgatcagcatgaatttacacagaggaatagttactttaatctcaatatacccgaacccattcgtgtctagccattgtgttagagtcaatccaggtttatatgcttcacaaacatactaagacagtgacaaacagggtgagcgctgatgtgaagggatctgctcctgtatgacttcaaggcatggttcagttgtgctcttcctattgtttttaaggtgatactttgtttttactttgttttgaatgtgcaataatgactagaggcaaaactctatttggtatctttgaagaaatcattgacatctcaagtaactataagagaaattcgggaaaaaaatccagaagagaaaagttgagctgagtgatgcctgatcagactgtgaggctctctttcctctcgtttccttcttcactgcggttagaagtcattacgtagtgagaaccctgttatcatttcaaagacatggttccagtttgtgtcaagtgaggaggaaatatgtacatttagcacagatagaaagagaagaagataaaacctgaaaaaaagaaaatgtgtgtctcaatctgagataaatcagtcaccgacgtcttcggaagctatcagcctgctgcaacagggcagaacatccgacaggtggttataaatatgaatttgtttctagcaagagtacaatttccatgtaattcgcattgcaatttgcttattttaaagtcacacatctgattaaatcatgtattaattatcactaagatagtctgaatcacaggctaatttgatcttcagatcaggccactaatatcaacattagctttgtgccctgattgatggttaacaacagtgagaactgccatgaacataatcagtcttcattgcttactgaataatgtttaccaaactttgaagctaatgtcctgcagtaaaaatatcagtacctaaaacactgagaaatgtagagtatggatacattcccactgttctgtacacattctcctgctattaaattatattatgatctgtaaaatagctcacagaaatagggcatcctttagttattttggtggaccttctgtttgctacaaagttgttataaactgatttcatatatagtatatttgcgtattttaaagcaagtaccacttatagtcaaattgtcctatttatgtatgcttagttcagatatattgctgtaattaaaaacatgatttgcttactcacaattactataactgaaatatgttttaatatttgcctttatacatttggatatgactatgttgttatcttttctaccttgttagaatcacatgctttaagtgtgactactttattcttataaatataaagttcgaaaatactggctggtagtaattgagtgagttaatcaatatttccctttcagctttattaatcagttattatatgtcccaaaccatcatttttttaaagaatgtaaatgtgcttctacatagcttaagttttttctagtagtaattgatgttcttcattttagaatttccatatctatcgttaatcatgtcacaaagacataagagcttttagacgaattttttgcactgatgatgtttaaatctcactggagatgtcatcctatgttcatcagaaaatgtaggtgtgatgagtaaggcagcatgtgtaaacaattaagcaaaaggtgttgtgtgatattttgattggattctgacaaagcttgctctgaatcagagggcagagctagcccttagctgaccaaagttaagcatagaggttttgcaggactgagggcacactgagacaggaaatagtgagacgggactaggagaggatcttagtgcttttggatggagaataaaagagataggaggtcactgatggcttctctgctgcttctctgatcactcaggttcttaccttgatatctgtctcccaatgttttactgatgaagaataattagataaccacatcatttggcattcaattcagggaacaaaatcatgagatagccactcgcccctgactttgcagccactggagccacaggtaccggatccactgcttttcttttcttccacaagccttctgagcaagtctaggattttcctgttgcagcttccctataacaccctccagctactgcccaaactccacaggtctctgggctccaatgtagttagcagcccttgactgctggctttgcctttgggcagctctgtgctatcactttataacatgtgcttcttctgcacattcccctgtgttcgttttcagacaacaggctccttcttcccctggttacaggcttcccctggctaccgtcctctgggacactgccacacctggtaagtcaccttgatacccactcaggcttctattgtatttgtaactgccacacactgttggctgtagctgccctcagtcaggctgtacactgtttttttttgttttttctctgcccagccctgctacagaatgacaatcagcctcacacttcactgtcattgtcaacagacatagtgagacaactaggaaattttaaggggttgggaattagtttttataaatattttccacattaaaaaatgggaaacattatgattcagggaattaggtctctggatagttccataatggatggtttgaaaatggaaaaattagatgaatggataatcaacttaactaggactgacataattgacacaatgtcaatttataatcatatcattttgttaattcatccttacccctaaaactgttgtgtgctaacagtgccaagcatgaaaaattgacagataggatacaatccttagaaagacatactaatgaaactaagaaaaatattcacacacagaaagaagagtttaaaacagaagctactgcacatttgcattatgaaactgaagaggaatggctctaagttattagaaaactagccttaatttatccagttaccattcaagaagaactaccagatgatttgtacccacaaggttattcaggagttaactgggatcctatggaaatgttagatttgaagcaatttatggaaatgatagtttcatatggtaggcattcacgtgttgggaaggatatgttaaattaatggactacttggaacacaattgttctgcatgtctcaaaggaattatttatagcagtattggaagctagtcctcagtgaaggtgaagaacatgctggagagatgaagccaggatcatcaaacaatgaggtatggatagagtatatgagatttcccaagatcaaatcctggatgagggttattatgctgaggaataaaagattacatttgataatctcaccttcatcctatgctatctagcagctttgaatgctttggacaagattgaaaaatgaagaaagaggactgacccatatgctaaaattatacaaggctaaaaagaatccttcactgatttttttttaataaagattgatttcagctgtaaataaaatgatatcagatccagaagttagacaaatattaattgaatctttggcttttgaaaatactaattcagtatgtaaaagggtgatcaggcacccatagatgaatggataaatacagctgatattggatctcatgtttatcatgatacttggataagagaaattgtttctaaaaattttaagaaaaatcaaaaggttaaatgttttaattctggtaaaccatgtcatattaaaagggattgtaggcaaggtgttcctaggaacaatgatttttttttctagagataatccaaatagaagacaacagtcttctggaatatgtaggtgtggcaaaggtctacattagactaatgaatgcagatcaagttggggcaggataggaacccatttgtcattggaaattgcctttgtgggcatccataggccacagtgtcaaatatgattcaatcattctctgtcagcattggggaaactcctctacagaacaattaaaaacaacttaatacctattatggaaaaccatattgctctggatggcagaacagctttagaagataaaaaaaattcagtagaaaccataaagaaaatattttgccaaagttctataaaagatcatagactaaagttaaaagtatagataaatggcattgaaattgaagatttagtagatatgggggcagatttaataatacttgcaaaatcttggtatcaaaattggcctcttcagtaggtaaatgtttagcttttaagggattggaacattatcagaggtaaaaaacacaagacaggtgaaatttatagggccagaagaacagagaggaaaattaaaaccatatgtagctaaaataggagtgaatttatggggatgtgatttgttataagaatggaataagaagattaacatttctccaatcccagaaacaaatcataaactagcatatgtttctgagaaaaatattaacaggtattataaagaatggtcaccaaccattcagtttctgcatataagtagggcacagcagctgcttatatatgttcaaggtaccaacagtcctacctttaaaatggttaactgacaaacttgtctgggtggaacaatggcccttaaaaacagaaacattacaggcattagaaaagtttgtatgagagcagctagatgttcaaaatattgaggaaatgaccaatccttggaattctcctatatttctcattaaaataaatatgcaaatagagaattttccagagcatcttaaaatagttattgactctcaatatgcagaaagagatgttttacatattgaaactgctgaacttatttcagatgattcaaaattaactttgttatttatacagcaatacatagtaagaaataggaatcatcccttgtatataacatacattagatcccatacaggtctactaggccctctagtacaaggtaatgatgaagttgatctgctattggtaggaaatgtgttaaaagcctcagaatgtcataaaacaccatcctaatagcaaaacaattctgtacaataaaagttcttctggaggcatcaccatccctgacttcaagctctattatagagccatagttctgaaaatagcttggtattggcacaaaataggcagatagatcaatggaatagagttgaaaaccctgatattaacccacactcctatgaacaccttatttttgacaaagatgctaaatctatacaatggaaagaagatagcatcttcaacaaatggtgccggcacaactggatttggacatgcagaagattgcagatacatccttatttgtcaccatgcacaaaaacttaagtgcaaatagatcaaacatctcaacatacatccagccaaccctgaatcttctagaagagaaagtggcagatacccttgaacaaattggcaaaggagactgcttcctgaacattacaccagtagcacagacattgagatcttcaattaatgaatgggacctcctgaaactgagaagtttctttaaggcaaaggacacagtcagtaagacaaattgatagcccacagactgggaaaagatattcaccaaccctacatctgacagagggctgatctccaaaatatacaatgaactcaagaagctaccaccaaaacacaaaacaatgaaattaaaaagtggagtgcagaactaaatagagaattctcaacagaagaatatgaagtggctgaaagacacttaagagaatgctcgaaatctttggccatcaaagaaatgcaactcaaaacaactctgagataccatcttataccagccataatggctaaaatcaaaaacaccaatgacaatctatactggagaggatgtggagaaaaaagaacactcctccattgctgatgggagtgcaaacttgtaagaccactttggaaatcagtatggcagttgctcagaaaaatgggactcagtctacctcaagatccagaaattcctctcttgggcatatatacaaataatgcacgtccatacaacaaggacatatgttcaaccatgttcatagcagcattgtttgtaatagcaagaacctggaagcaacctagatgtccctcaactgaagaatggatagagaaaaagtggtacatttatacaatggcgtactactcagcagaagaaaagcaatggaatcttgaaattcacaggcaaatggatggaactagaagaaaccatcctgagtgaggtaacccagtcacagaaagacaaatatggtatgtactcacacatatatgaattttagacatagagtaaaaggattaccagcctacaatcctcttcaccaaagaaactaggaaacaagaaggactctaagggaaaaaatgcatggaccccttagaacgggaagatgcaagatctcctgagctaattgcaagcatgacagggacagggaactgccagaaatagaggaggaggaaaacaggggagaggaggaaatggagtagcagaaatgttgagttgggggaagaatagaagagagcagaatttgagataccatatcagaggagccattataggtccgaggagagatctggcactagtgagatttccagagatctacaaggatggcatgaactgacaatctaggctatggtggagaagataatctaaatgcccttccctatgatgagactgatgactacattttatgccatcttagagccctcatcctgttgctgatggaagaaaatgcagacactgacagatatatattgaacctagttgcagagagggaggaatgaagatcaaagggattggtaccagggtggtgaaacccacagaaacagctggcctgaacaagggggagcagatggaccccagactgctgcctgggagactagcatgggactaatccaaacctgtgaacatggatgtcaatgaggaggcctctgaactctatcgggcccctggaagtagattagtatttttccctggtgtaagaagggactttgagagcccatcccacatctcagcctggacacatggcagagggcctaggctcagaccacgatgtgatgttgttgtggactttggggatcccccgttgagggccctacccagcctgggtagtggagggtggatgggggacaggtgggaggttgggcgggagggttgggggaggagagggaaagggaggagggattgacatgtgaagcaagcttgatcctaatttgaactaataaaaaaattacaaaacaaaaagaaaaacaacaacaaaagatttttctaacacttgtcaacaagccaagaaaaatataaggaaatgtcatagttattctttgtgtaaccaaattccactcctgctggaagtaacccaaagggcactcgtagaactgaaatttggcaaatggatatgattcattttgcagagtttagaaaattaaaatatgtgcatcaaagcatagattcaggatttcaatgagcaactgtatcaaattctgaaaagtctgatcatgtaactatgcatttatttaaaattatggccgtcatggatatacatgaacaaattaagactgacatctagtatatatctttagtaaaatgaagcagtttttgcatattacaattatatcacacaattctactgggcaagcagttatagaaagatctaactgaactctaaaatgtatgcttaataaatagaaaggaattttaaagaccccctagagatagattgcacaatgttaattcattttaaacttttaaaatgctaatgacaaaggaacaatggctgtgtaaagacatgggctgatagaaaaaaaaaaaaactgctgaattaaatgagcctttataatttaaaaatgtgttgacctcagaattgaaaccaggatatgtgtttcattggatgagaggttttgcttttgtttccagtggggggaaaaagctatagataccatcaaaattgataaagattagattcaagcaggagagacctagtgattgaaaaggtgatagttcatcaaacaccatgacgaatcactctaaactaacatataagactaccaaatgccttttctttgatgatatatactttgccaaatatgatatttccaaaagctagggttggggcaggattttgtttttgtctttccaagagagtgaagacatccagctaaggaatctgaagaccaatggacaaataagacttctgaagaaaaaaggacaaatcatccagagaaaatgtcccaacaaaaagaataaattggtctaatggaaatggcacaattccaacatgataaaacttcataaatcttctcagatgcttgtttctgctgttctctgcagacatgtaagctgaatggtctctttgttgccccagttcaattaaaaataaaagcttgctaaacactgagacaaactcttagaatcaagttatagagagggaggagtgaagagcaaaggggtcaagaccaggctggagaaacccacagaaacagctgatctgaacaagtgggagcacatggatcccagactgatagctgggaaaccagcataagactgatccagaccctctgaacaaggctatcaatttggaggtctgaacactctatggggcctctgatactgcatcagtatttatccctggtacatgaattaactttgggagcacactctacatagagggatactctctcagcctagacacatgtggaagggtctaggccctgctccaaaagatatgacagacctttaagatccccatgaaaggcctcattctccatagagagctgttgggggcccgggaaggagtggggtggaggagtgtagggagagggaactgggattgacatgtaaaacaagtttgtttctattttaaattaaaagaaatcaaagctgcctttggagtttggagtatgaatttttccttgtctaaaactgagtatgattattaaaagaaaatcgaaaatctctgtctcatgtcagaagagccatctgatacaggacagaagaaaagccaaaattaaggtactattctattgccaccaatctcataaacctttggttttattttgaatctttaaattttttaaggtataaatattatctcaacatttaaaaaatgtatgtgtatgaatataatgtatatacatatacaccttccattgtgatgttaatggtcatatagattactaattgaagaaaaggcttaatctagcttcctatacatgattttgggcttgagtctgaatcaggtaactaggaattaagtttgtatattccagatgctcttaacaaattttgtgcctttaacttctctgagatctgtatccactgacatttaaactgcttaaaatttctgcagtgaactgtggccattcataccagtgacttacaaaaggatgatggggctccagaacaaaaagattccatctgaatagttataatgccaatcagctgagaaacaccacccaaatatcatctttggactacaaactgctcaggacaatttcaaggtaactagttaagatagtgcagcctcacagactactctagccatgacttgagctaaaccttgcacttacccattacacagagaatggacaacaaatgacatagctagctctcccaggacgtgaaaattatctcaattttctcaccatccctcagagaatccattgcacccaaaacaacgggaagcaatctagagtacatgacacccacattcccaaggggtgggctgtgtgggtttggtaattcaattggttatagatatttgtcatagtttaggtgggttgattacaagttgttactggtaatggtcaggaaaaaagctgagcaaaggagattagattgatctcctttggaaaagataaaggaagatataaaaatgataagataaaatgatagactattgaatctacttttaaactaaagtagcaactactagttttaaatattttacattggtatgaatttttgtatattggtacaaatttaagaattttttgttctactctatatatttttctattcttatttaatatagacttgtacattgatacaattttaatgtattaattagaattaggttttgttagaacctactatatatacatttctaatcttatttaaggtattgttcctatgcagctcatttaacaatgtaatgtaaatttctagaccttgaaaattattagtacaaattattttggctactaaagctaggaagatcaagctttacaatcaagttttagtcctgttaggtatgtttttatggtcaaacagagacatatcttagatggacaggttgtcttcaaactcttcagagatttacagaccatggaatttaagattttttaataatatgaggctttttatgacaatgagacttgtctaatcctggcatcactagtcttcttcaaaaaagatgatgggcatcaaagaaactccatttagagtttgctttctttgtagcaaaaaagttatccattagttaagaaactgctcatgcctcaactgctgacaatatgctgctcaaattggacaagcagcacacaaaagagactgtcaaattttgccaaggcaggagagtccttcaaaactccagcttcacagaaggcctgtcagatattctaggcctgtaggcctaggatggatgccccaatgttatagacaaaccttgggtgattgtctaggcagccagctagttctgtcatttcttagttttgaaaaatgttttctttgtatttcctgtttactcaggtaatattatatcactctcagatttctgatggagttgaagactagttagttatagctacaaaattttgtcataaattcagaacagaaaaaaaaaggtgtaacatgtataatgttgagagacattaagtgattggtaataaagattaggatagaaagtaaataaggtacgaaactttgggctcaccaatataaaatagataatgaagtattttctctgaatttgctaaatacaaatcgaatggaccttgtgaatgtaattcttacctgataattacacttgttgtataatattttactataatagagttaaaaccttctattttcatttagacaaaaatgaggaaatgtgtgatatttttattgaattctgacaataaagcttgtttttaatcagacagcagagctagccagtagctgaacaaaactaaccatagaggttttagaggactgaagatagagaaacaggactttttttttttttttttttttttttttttttttgaaagggtttggaagctgacctggaactagctcttgtagaccaggctggtatcgaattcacagagatcctcctgcctctgtctccggagtgctgggattaaaggtgtgtgctaccaccgcccggccaagaaacaggatgtagtagggcagggtttctagatgatctcagtgctttgtgaggggggaatggagaagacaggagatcactggtgccttctccaaaacttctctgatcattcagaatctcacccaaatatctgacttcctattttattgattaagaataattagataaacacatccaaaggagctctttatgaaacaatctcagaagtgattttacagtcagtatcccatgtgtcataaatcaaacatagggatgtagagagtggacctataaagttcttctgcatgagtatacaacactgtagcttccttgtcatcttgcagctaccctgaatactgaagatcactctgctctcttcactacttgtcttggctacaaccagggaaaaatatatacagcctgacatctttaaaatgagaaaatgtgagatgcttctctttattcccatacagatgtgtatttatctgccagcctgaaacaagcataatctgagcaatttgttacatggattaatggaaaggaagagtaggaaaaagtgtaattttcattaaacataatggtatttatctgtagatgagatgatataaataaagccttttgaaatcaaaagtaaataatcagaaagtaatatgtaaccactgggattttcctttttgtggtacattttcaatacttatctgtactacccattagattggtgtgtcaattatgttagaattttcatcatttaccttagagatcattatcattcatgaggtttatcatgttctccttttataggccaatgacctaataaagcaggagtttaatgtgaaattgggcttacttttcttattaaatcaaagactcacaaattctttaggttcacaacagttgctgatatgtcctatatctgagacttagatatctgtcagtaaataagaagcactcagtgttctgaatgtcagagggagtaaaatatcaacaatgtttatatgacttgcgtcaattgcccaagcattgaaaaagcattagatcagcagaattgttaagggagatggttttgaagatgctttgggtggcactaaatgtcttatgtttgcttttagtgaaatcagttattggatacatttttttagtgggataacattgactcatgcattctttggatacgaaaaggatacagaaacactaagctgagagttatctgtccatgtgggagatgacagtggtttgagacaagtgcaagtagcaaatgagttggtgaaaacacagttttcattggatagttcattgtggagttttctttcttaactgtataagtggaacaatccaacattttctaataaaatattagatttttgaggaagagttttgtagttacagaaagtggcaatgaatttctctaaatccccaacacaaaatatttagtagaaagttacttgtatgaatttcatgtaaaacagacccctctgacttaatgcacttctagaatgcataatcatataaatgaccatgagacaaaatgaagtcactttgctagctatgtataattattggcttgacccaaccaagaatatcctataagtatagtcttaatgaggaattgttagataaagttggccattgggcatgtgtgtaggggattgttatgtttcttaattgatgatggaatatccagtccactgtgggtgatataatctctatgaaagagctattgaaagaaacagaagtggagaaatctaggtgcaagcagggaaggacacatttattttattcttagtgttgactttagatgtgttgagattagatgtttaagttctacctttatttcctttcagttgacagtgtgtaaattggagttataacctgaaataaatcccattctcctttgagttgttcttgtcaggatgttatgccacagaaaaataaacgagaatagaatcttcactaagaaagcaagcgatcaaaaaagaagagaccataaatcatgagtattacaatgttttcagattagatgatgaagagtaatgaccaaaaagaaaaagaaaaaaaaagcgtgagctatgtaggaggaaataagagatataaagatactctggaacttttggaagaatatagatcaactggactatgcatgcttaacagaaaagcacaaaaatgagtaagaaataccttgcaagtttttgtaaacttgagatcattgggaaccaggtcaaaataagttcaattacattgacataggtgatagcctgaacgcagggcttcacaagtctatatggatagtggtgacctcccaagacttttctgctgtgaataaaggcagaacaaagaaccactttcaaagatgaatgaagaatgtatgaagcttgctaagactgctgaagctatgttcatttccatcctgatgtaaataaattttcagagaggattttttttttttttttacttctgagaggaaggctgaagatattccaaacaattgagtcctgtttcctcagagcattttaggaatctgtgagacatcataaatctgggtgataggggaaatgtggatgaaggggaaactgatccttcagaaagcacttgtactacagaggcaacagcccacattctgccagtagctatgatgtttgtgtccctcatttatgtagcacctgggcaaatattctgagtttcttgcccttaggggattcttcttcttttcttctaaaattgtgtcctggatgtatgatagcaaggacactgctcagcaatcactagacacaaaggacgaaccttcagaaatagaaaatattgatcccaggttatctcacttcaaattctaaaaatagaaaagcctaggtgccatggcctcatctcctgagttttaaggactcctttccaaagtgatctgttaaaattactgatcttgttataccatatagtccattgctatattaatgcacttagattgttagagaagaaatggaaatagaacaagtattttaaacaaacaactagctaaagatccagttatcttttcatgaaaagcatggatatgaatgagaaagctcaacagtttcaccttgtaaagtgacttattatgaaaatgggtattttcaaacagcagatatgctctatcactttggatttatttgccaagataactgatacttcataccaatggtttatcacaattacataaaagctaaagaggcatttctccctatattccaaagacatgtgacattgttttgtctttgttgggatttagttcctcagaaaattttcatgtataagctaaaatatttgacattattaatttaaagagttgtgtatggctgctagaaggggagaatatattttttacagaaacaaaatccctggtaggttatcaagtcccaagtcatccaccataacacatgttcacatgaataacactaaaagcattccacagtatatatggtatttgaatgtaattatcctcataagctcagaaggcactattaggaggtgtggttttgctgcaatacatatggtcttgttggaggacgtgttttaccgttgggtaggctttgaggtctcatatgtactcaagccacacacaggaattagactgtttcctgatgcctgcaggtcaagatgtaagaactctcagctcctccagcatgatgtctgcctgcatgttgccttgcttcccaccatgatgatattggaccaagcctctgaactgtacgtgtgctactcttttactttataagaattgtgatcatgttgtctctccatagcaatagaaaccctaaatctctctctctctctctctctctctctctctctctctctctctctctcttgttctttttttcttccacccctccactgtctctctcattatggaagaatagggatgagtttgagagaatatcatggtcagaattgcaaatggaagagggaaggtggcaatgatgtaagcacagtacttatgtatggacttctaaatatatcccatcacatcttggaaattttcctaaacacataagcagtgtgtttaagtttatgttcataatcatttacatacatacactgagggagaatggcataggaaaggagggatggtgggaaggagaaagagacatacagagagacagagagacaaagaaacagagacagattgcaaacagacaggtttgagctatttccaagtacaagagaagttccctatattcctctctcacagtaagaaaggaaaaaataaaacaacattcaaaattcaacaagccatcttgagtagtataaatgtatattgcagactactagataaatatagtaatgtactcagtgttaagataaactaaactgtaagatatagtagaacttaacatatcttaaaagagcttaagcagatattctaaaatataagttaatatcaaaaggtcagtattaatcataatgttaaatattgtcaaatgcatcttttaataaatttcacattaatgaaatgtgtgtactgaaacaagctaaagctctttatctgttcatagattgagaaatatcataagaaatataaaatcaataattttaatttatgaaaatgttgtataatatttacaaatgcaatatgtatacaagtatatagaagccaggagaataattttggatgaattgcaacatgacatgaaagcaataatcctactattttatagtggcctatgaaatataactatatgtactctgatataatacatagtaggatgtaattaatgagctaaggtctggctagcaagaaaaatcagaatatattatagataaacaaaagatctcatttggcaatagagtttggtccagtatcattaattctttatctaaatttacgtgtgtaaatggacttaacacatacttaagcccatgcatacatttcctttctgtattatgcaagactttgactcacagccctgtttactggatcatatttgcaatttttcccaagtatctttgagaatttgatgctatctgtaagtgcctctaatgtaaaatgactgtcattaaatattgatcattggtaaaaatctgttaagatgacaacaataaatatcaacttttatatgtgtattatgctaagatgtatctattttactgtatccaatgaaattctctatatgtgagtagttaaatgcattaaaattatgaaagtttatcaattcaccaatacaagtgagaggcttgagactatagtgaacagggtcctgttatgccctcagggataagttaatgagtttggcagtcagccttatttcactactgatatatcattcagcttctcatcatattcaaattccttttgacttctagtgttagagtttcttacaaaccacaaacacatgcccagcttatggctcctcatggcagttgaaaactccaatttcttctttcattaagcaccatcagcaactacacagctacctagatcttccagggtgctgttcttgatgtttcattggtgggtatgggtggtatttggttattgatattttagttttgttttgtttttaatttcaaacagtaaccataaatttattatttccaccatgcacttttctcctccaacttgccttgtgctttcctgactcactcttgaatttatgaccaccttttctttaattattattgttacatatattttaattgtaacttacaaatattacctgctgagcacattaaatgctggttgaatacatgtgtattttgggctgaccgcttgagaatagataatcttttcagagactcaaccttagagaacactgattcattaattacccgtgctctatacacaagggatgggaccttgtgaaatttcccatccatattggcatgtctgctgttattattattatgcaagtaatgcttaggtgaccttattgctgagatttcacaggagcatcttcctgtcgtgtctagcagaaactatcttgcagcatgtgtatggtcttctgcatcttacaatcaatgatctctaaattttccctcccaccctcccttcaataattactgaagaataatcaaggtgcattatatagatggttctttactcagtcatatgcttgaattttcacacaaagcaaatatcagaaggcttaatttctgcatgcaggttggcaatcacaacactgagatttagaaaacatgtgtccttgattttacaaacttagttatttctgcttgtggatacagtatacagaacattggcctgtatatgaaggtaaaatagctttagaagttcagtgatatcatttttttattctcaaatcacactctatctgtcttttactttaaaaacaaaggttaataagtcaaagaaaaagtttctcactggaaaaagtgtccttaatgggaggttgaaaacaagttcctaaaaacctcaatagagaaattcttctctaatttagcagttgttgctgctgtgttagtcatttcacagcaagacttggcttttgtcctgggaggaggggaggtgtatcctcagctttttctggatgatttctggggtttgaacctgcagcaagccaggtattgctgttcatccttccagcggaagcattcagtggcatgtcacacagacatatctaagtgttttctgtttgtcattaaaaatcagaatggaatacaaataaacacaaagttagaagtaaccatttgtaagtagaatcaatggccataaatcagcaaggcagagtcataggatctttcatgggtttcttctaactgacactggaattcagaactgacttcagtgtttgctagagtggaagtcgtggtgttcactgtggggatgaaagatttttcacagaatgtagagattcatttatttgttaaaaaattgttttgtttattgatattataattacatcattttcagttcccttccctccatccaatgcctcccaggagtgtcctggttctctttcaaattcatggtctctatttccttcattgttatcacatgcatgcaagtgcacacacacacacacacacacacacacacacacacaaactgctgccactactacacatataaacacaacatgcttggttcatatgttactgtgccacttgtatgcttagatttcagggctgaccacatgataccagataaccaactgaggatggaagatagtttttcccaccctaaatcttccccatttccactggggtcatcattgtttgactcttgtttattcagccatgttgatgaaactttatgggtgtagcctcttggacattattttctcacccctcatcaaagaagcttctcttcataagagacagagatcattacagaaaaccacagctagtcaacatgcagagaaaaagaggtcgcatgctccttagctccaactgatacatgtataacaccatccttgcaaccgaggcacagtgttcattgtggaagatgggatgacatgatggtcagaaccagatccaggaaaatcatctatatttgtttgtaacttaagatgtggtatttctgtggtttctagcatgtaaaggaagaagatgaaacatggctcatgagcatgaggtgttgagattcatgtggaaaattaaaaaaaaaatctttttttcattgtataatgaaaggacaaacaattagccaaattagaagccattagcttgtttgctcgagatctaaacaagataatataattgctagcatcccttccccgccgtagacagtagacagccaggttcttctttttcatcaaagccaatcactgtagacagtcagtctgcccaaagaacattaaaaagatttctcctcaataataaaggcttttaaaaaatttgtttgtattatattaactactctttaagctctcatattcaatttgcctgaaaaggtcctgtagtactaaatcagaagtggaaatttcccaggacactagaggctcactgagcaatgcgagacagcagattaagaggcataggccaacgtgcagggttacaagggctgcaggcatttacttaacaaaacaaagtgctgaggcagctgcactgctattcttcaagaatgtttattacaagctctttacagtatcagaattttttctccttcctcttatcactagtcagtagaatacaattactcaactatcaattttgatttagcaacaacttctctatttccactatcagctgatcctcctggtaacagatgagctactgaaggcaatgcagcacttccttaaagcacagggactggaaaatggaataaaatttattttgtgcacacactctaaatagatgaaaatggcagaagctagaaatagacaagggctagcagctttgcttatttgagttttactaatagcttctgagaaaggatcattgtcaactatgcatatgtagtataaatgagttcataaatgagggcttctagaaacaatatcattattagaatatgaaagtcttacctgttatgctatttataattcatgtaggtaggcattgctgcatctatcagaatcactgataaagatctggaagatctctggatcatctcaaccaacatgcttgtgattttattatgaataagcaggcattcaaagaagatagaaatgcaccattaaccagaattaatgggctaaatctacctcacctgtttctgtgcagaaatttgctatatttgaacaaacatgtattcattgttttgcatgttatacatatcatatataccttagattatacatagaatatataaaatacagatgttaaaaattgcaaattaagagagcaaataccttgaaaatttttaaagtgccaatgttattttagagattcctcatttctaacagccacaatatataaggttttcaaggtttacactaaaaatgtgacatagtaactttgtatttaaaaaaagagtttaattgctatttactatgtgtaaacaattcaaaaaattctaaattctttcaaaataactagggtttaatatcccaaattgaatggatgactagagaataagaacttaagttctgtctcagaaatcagttacatttgattcccttcagaaatcaaacagtggcaatctgagtatgtggtggtgactactcctgtctttgtataaaactcagtgtctttataccactgaatgataaaataggccaaacggaagaagaatagctatacaattatgttggagaataatacatggtatttatttatttatggaaaacatagcaagaaagatgagagctttaaaatttttacttatttatgtgcattttgtcagcatgtgtgtatacatatcacatatatgcctagtgcttgcagagaccagaagacattggatcctctggaactggagtcacggatagtattgaaattctcaataaagggatgacagtggtctcaattggaaagaactttccctaagttaaaaaatgcagacattgataaacctgtgggatattttcaaagaaaaaaagttttatagtctgatgaaagtatgatttgaaatctgagaaatgggaataacaatgatgctgttcttaatccagagactcagacacacagaaagattattgggaagaagttgctaagcatcaatcctatacctacacaagttggattttattgtgagtaattgcatttacatggaagaacacaggatataaatatttccttgatgggtatcaaggtgaaagctgtgatggttttaggttcttatcaagctaccccaagttgatagttttctcacagctcttctgtatatgatatttgacttattaggtataagctcttagaagattaaatttcaccaattaacagtaatgaattaatgtaggatttcagatacacttatcatggtggatgtcacagaggggatccaacagcctgtaggcagaggactagttgatagacctctaaatgttgatgctcttatgaatttggtcatgctccttttttatttatatttatatttatataaaaagaccaataatggcagtatgttatgcatcagtaacagcaacagcttttgcaggttgtgcagtaatttgaacaaaattgtagagacatccagcacactccattttaaaaaaaaatagtaaaagtaaatgacaaaatcccagaaaacaatatagttctgtaactcttgtggtacctggcaccatttttttttttaaattagcttctcaattatcatctggaaggaaaccattctgagcaacatcattaaaaacagctctgataaagcacagtcaatactatgtatcataaagcaggtccacatatgagtgagtacatatcatgtttgtctttttgtgattgggttacctcgctcagaatagtttcttcgagttccatccattttcatgcaaatttcaagattccattgtttttttctgctgagtagtactcaattgtgtaaatgtaccacattttctctatccattctttggttgaggtactgataggatgcttccagtttctggctattacaaataatgctgctatgaacatggttgaacagatgtccttgttatatgaatgtgcttctttgggtatatgcctagtaatagaattgctgcatcttgttgtagactcattcccattttcttgaggagtcgcaatacagatttccacagtggctgtacaagttggcactcccaccagcagtggaggtgtgttcctctttctctgcatcctctccagcataaactgtaattggtgtttttgattttagccattctgacaggagtaaggtggtatctcagagttgttttgatttgcatttctctgatggctaaggatgttaaacactttcttatgtgtctttcagccattttagattcctctattgagaattgtctatttagttctgtaccccactttttaattggattgtttggtgtattggtgactagcttcttgagttctttgtatattttggaaatcatccctctttcagatgtcgggttggtgaatatcttttcccattctgggggctcccattttgtaatgctgactatgtcctttgccttacagaagcttctcagtttcaggaggtcattgttctctttaattctattttattgacttcagacctcaatgtgattatttcatgtcacctactcctctgggagagtttgcttctttttgttttagagatttcaggtgttctcttaatttgatagtgtgggatttctctaatttctttatataggtgtttagagctatggagtttcctcttagcattgcatccatagtgtcccacaagtttggctatgttttacattcattctcattgaattctatgacatctttaatttttctttatttcttccttgacccggctctcaaaaatcaggtgtatgtaggtgtgtgagttaatatcagggttttcaactctattccattggtctacctgtctatttttgtgccaataccaagctgttttcaggactatannnnnnnnnnnnnnnnnnnnnnnnnnnnnnnnnnnnnnnnnnnnnnnnnnnnnnnnnnnnnnnnnnnnnnnnnnnnnnnnnnnnnnnnnnnnnnnnnnnnnnnnnnnnnnnnnnnnnnnnnnnnnnnnnnnnnnnnnnnnnnnnnnnnnnnnnnnnnnnnnnnnnnnnnnnnnnnnnnnnnnnnnnnnnnnnnnnnnnnnnnnnnnnnnnnnnnnnnnnnnnnnnnnnnnnnnnnnnnnnnnnnnnnnnnnnnnnnnnnnnnnnnnnnnnnnnnnnnnnnnnnnnnnnnnnnnnnctttacaggtctttcacttttttggttagtgttactccaaggtattttatgttgtttatggcaattgtaaagggtgatgctgatttctatctccaccaatgtgtcatccctatatagtagggctacagatttttttgagttaatcttgtatcctgccactttgctgaaggtgtatcagctgtcggagtaacctggttgagtatttcaggtcacttatgtagactatcatatcatctgcaaatagtgagagtttgaattcttcctttctgatttgtattcccctgatctccttttgttgtcttaatgtgctagctataatttcaaggacaatattgaagaggtatggagagagtggacagacttgcttattcctgattttagaggaattgcattgagtttctctccatttaatttgatgttggctgttggcttgctgtatattgcttttattgtgttgaggtgtgttcctgttatccctgatttctccaggacctttatcatgaaggggtgttggattttgtcaaaggctttttttggcatctaatgacataatcatgtgatattttttcctcagtccatttatatggtggattacattgatggttgaaatatccttgcatccctgggatgaaccctacttaattgggatggatttctctgatgtgtccttggattcaatttgccaatattttattgagaatttttgcatcaatgttcatgagggatattggactgtagttctctttcttagttttctctttttgtggcttgggtatcaaggttattgtggcctcataaagagtttggtaatgacccttctgcttctattgtgtggaatactttgaggagaattggtattagctgtatattgaatttctggtagaattctgcacagaagccatctggccctgggcttttttggttggatacttctaatgactgcttcaatttcattagaggttataagtctatttaagttgcttatctgttcttgatttaattttggtaagtgaaatctgtccagaaaattgtccatttcctttagattttcaaattttgaggaatataggttttcaaagtatgacctgatgattctctggatttcctctgtgtctggtgttttgtcccccttttcattcttgattttattaacttgcatgttcactctttgttgtttggtaagtttggataaaggcttgtctatcgacaggcgttggtgccgcacacttttaatcccagcactcaggaggaagaggcaggtgtgtctctatgagttccagaccagcctggtctacaagagctagttccaggacnnnnnnnnnnnnnnnnnnnnnnnnnnnnnnnnnnnnnnnnnnnnnnnnnnnnnnnnnnnnnnnnnnnnnnnnnnnnnnnnnnnnnnnnnnnnnnnnnnnnnnnnnnnnnnnnnnnnnnnnnnnnnnnnnnnnnnnnnnnnnntttccattttattgatattcaaccccaatttgattatttcctggcatctgctcctccggggtgtattggcttctttgtttactaaagctttcagttgtgctgttaattctctagtgtgattattctcctgtttcttcatgtaggcatttagcgttatgaacttccctcttagcactgctctcagagtatcccataagtttggatatgtgtgtctgcattctcattgaattctaggaaatctttaatttcttttttatttcttcctggaaccatgaattgtgcaattgcgtgttacttaatttccatgagtttgtaggttttctatagttcgtgttgttgttaaattctaattttaatgcgtggtggtctgataagatacagggggttaataagacacagggggttatttcaatttttttgtacttgttgaggtttgctatatttccaagtatgtggtcgattttagagaaggttccatgtggtgctgagtagaaggtaaattgttttgtatttggatcgaatgttctatagatttctgttaagaccaattgctccataagttctattagttcttttgtttctttgtcaaggttctgtctggtgtttctgtccagtggtgagagagggagttgtaatctcccactataagtgtatgcagttttatgtgtgacttgagttttagtatgtttcttttacaaaattgcatgcctttgtatttggggcataaatgttcagaattgagacttcatcctgatggatttctcctgtaatatgtaggaaatgaccttcttcatctcctttgactgatttgaaagtccaatttattggatattaggattgctacccccgcttgtttcttgggtccatttgattggaagaattttccccaacctttaatttttaggtaacgtctgtctttaagtttgaggttgagtttcttatatgtagcagaaggaattattctgtcttcttatccattctgctaatctgtgtctttttacaggggagttaagaccattaattttgatggatattaattaccattgattgttcattcttgtttgtttttgatttggtgatggtggagagattatgtgtgggattctatcactttttcttttgactgttggtaagttgggtatattattgcttatgtttttctgtttgtagttaacttccctgggttgcagttttccttccagtactttctgtagggctggattggtggatatgtattgtttgaatctggttttttcatggaatatcttgttttctccatctataatgattgaaagctttgctgggtatagtagtctgggctggcatccatggtctcttagtgtaggtagaatatctatctaggatcttctggctttcagagtttccaaggaaaagtcaggtgtgattctgataggtttgcctttagaggttacttgacctttttcctttgctgttcttaatattttccctttgttgtttatgtttggagttttgattattatgtggtgaggtgaacttttttttggttcattccatttggtgttctgtaggcttcttgtattttcattggtatgtctttctttaggttgggaaagttttcttgtatgattttgttgaatatgttttctgtgcctttgagttggatttcttcaccttcttctatacctattattcttaggtttggtcttttcacagtatcccatagttcctggatatttagtgatagggttttgttggacttaagattttctttgcttgatgaatctatttctgctattgtgtcttcaactcctgagattctctctcccatctcttgtattctgttggttatgcttacatctgtagttcctgatcatttacccagcttttctatttccagcattgcctcagattgtacttgctttattgtctctattttggtttttaggtcttgagtcttgtactggttccttgagagatttgttgatatcctgtatttttttgttttgttttttcttcaatttctttaagggattttctcatgtgctctttgagatcctctatcattttcatgaacatgtttttaaagtcattttctggttcttctgtttcatgatgtttagttcttactggtgtatggttcctagtctccggtggtgtcatattgggttttctgttgttggatgtgcttttatgttgtcctcttctcatcctttcttctggtgagtatagcaagtgtttcttgttctcctggtgggtgtgggaccaaggttcttttctggtagatgcaaacagatctaatagtctgatgtcggtccccttctagtggatggaggtgtcactgttacccgggtgtcggcagtgttcaggcgtgctatgtcccacaggcctggcagttggaggcaaagctgtcaccgggccctgggagtcagatcctgctgccgaactccatctggcaagcaggtcgcttgcctcagatgactctgagcagctacgatgatgaactggaaccagaaacacttcctggcctacctgagctggtggatggaggcccggctgcctctgggtgtttggtgttcggaacctactgctgccgaactgggtcctccatgcaggtcctggtcatgctcctttaacagcttgaaataatgactgtttgaaatagctgaactcacttttaatagatatttctgtcctcatttgcacattgcttttcgttaacagacatttggcatagcaatttacaatgctgttttttatttttatttttatattttttatttagaaacagcgccatttgttggaaatgctatcttttttccattgtataattttagcttctttgtaaaaacttaggtgtttgtaggtgtgtgggttaatatctgaatcttcaattcgattccattggtctacctgtctatttttgtgccaataccaagctgttttcaggactaaagctataaaatagagcttaaagtcagggatgatgatgcctccagaagtttctttattgtacagggttgttttggctatcctgagtcttttgtttctccatataaagttgagaactgttctttcaaggtctgtgaagaattatgttgggattttgatggggattgtgttgaatctgtagattgcttttggcaagattgccatttttattatgttgatcctacctatccaaaagcatggaggatctttccattttctggtgtcttcttttatttctttctttaaagactcaaagttcttgtcacataggtttatcccttatttggtagcattacctgaaaacactgtatcttgtttgtggctatagtaaagagtgatgtttctctgatttctttctcagtccatttatcatctgcatatgttgttttctgtatcagataatctttgagaagagaggctacctgaaagtaaactgataactcctctacattctgtctctgtataagagaaacttatgcttactatgatctgtggagtcctcataacaggttgatacaattatgaagttctctttgtcttgatataaattatcattacaaacagtaacattgcttagtgggtagagctgattgctaacaagcctgatgaactgagtttggttcctagaacccagagaacccaggtatcagagaatgaacgctagtcctccagtctctacatgtatgtctttgttcatttacacacatgcataagcctattatttttgttttctctagtaaatatacttgcataaaataagttccattctgttattacttaagtactgatgctttcagttgtgtttggggcaatgtgatatgggatgcaactgtcagatttgacatgatatagcctcttcaaatacaaccttagtagatagccatattctgtcccctctgtccctactgctcttcctattttataccttttgttcttataccaggagcaaagacttaccagttaagttgatctcattttgtcttccaaactgcaacactcacttaccagtggtggacaaattttcactagtcattaactatccgtgcagtccagaatccaaatcacttaaataggcgtagcacacatcatgaataggcatggattcagctcaatttctttttacttattccagttatttgtcctgattaccgatttacaagtcagttatatctcctgaatacattctatcctttttgttgtcccaccagtgtctcattctgaaaaatacagatttcttagtattcttatttatttaaaagaattgggtagaagtaaagacacctagtgatagtgagaattctgtgcctcatgcaatataaactgtgtatatgtgtgtatagagatatagcaacatttttttcaaactaatgttgaaactaattatataattaaaattaatggcctatggaggctggagagatggctcagctgttaagagcactgggtgctcttctagctatcttaagttccattcccagcaaccacatggtggttgacaaccatctataataggatattctgccctcttctggcattaggctgtatatgcagatacagtactcatgtacataaaataaacaaatctaacacaaaaattaatgttctatgaagtgcaaccttcagagaggacttagaaaatgtaaaagtttaaaaagagagctccattctaatcaaaattaaatacctcactttggcataaattccataaacctgaacaatgtccatgatcttgaataaaaattcagaatcaaagtatctggtaattatgcacaccctactcttttcatttctactcataagaatgtcttccttcctctcttctttctttctctctctctctctttctgcctttccctcccttccttccttctttcttttttcattcttctttctttctttttgttttttttttacaatagtctgtcaggcaaacatctcacttctttaagtgaagttatcttagaatgaagatatcaacacttgcgacatagatgtatgcaataaagtaagcaaggtctgcaattatgagcaatactaatcctgaattatcacataagtgtgtcatcattcatgaacacacttttgacaaggtttatcattgtttgccataattcagttttcttaaaatatgacttttattttgttttgaggactagagaacatcttactatgttttttttttttttttttctgggacccaaccttctcaacttatatcatttaaacaggagcctcttagtgtcgctgtctcttttgtagaattattaaatattttaaatgtgtttacttattgaactctttgaaaaagacaagttatattccaaatgcttaataacttacaaattttatttctcaaatgagtgtaccagttacataaagtcacaatctaaagtatgtgtatactgagttagtagaaagtcttttatctgtactaatatctccctgcagggcatactttgattctttaaggactatttaataatactcaggcaggaatattttataatacttcagtagtataatgaatattagatttttttttagtttatgcattctgtgtgtgtgtgtgtgtgtgtgtttgtgtgtgtgtgtgtgtgtgtgnnnnnnnnnnnnnnnnnnnnnnnnnnnnnnnnnnnnnnnnnnnnnnnnnnnnnnnnnnnnnggtgtccacacaatccagaagagggtgtcaggtcacttgaagctagagttgattaaaggctatttggaggctgacataggtgttgggaactgttgggagctgcaaagtaccatgcctacaagatggcgccagtctccaccttctgccagcccgacagcgagtgctctctatggtaaacaactcctaatttggtaaaggccatgtatcctcttaattctgcttggagacaacccatcctggtgcgccacgtggggttagatgattggtagttgtaggctatatcaggccccatcttcctctacccggggccactccctgtaaatcaagtttcctgagtaaaactgtgagaagattcctcggtgtcacgtcgttcttgctggtcaagggtggtcgagacaagtggtggcccgtacggggactcagaacttctcacagtcggggtggcgccagtaagttcccaaggtaagtgggacaagtaggtccgcagtgaatgcggcaataaggtctctagtaaggagcaataaggaccttcataaagaggcaataaggtctccggataggagcaagactgttcgaagccgaagcaaaccgaaagtaaaaggcctcactcctgctttaacttgcagagtgagagtaaagtaatggaccccgctgttatagtggtgatttggctgctttttaacattgcagtgtgggctttcgttttttggtggtgttatccaacttgtacgtctccggagtgcacaaactattataagttagggaaagttaggattttgcctgggaacaaggaacattgaagccgcgtgttcggcaggtatggtgactagtatgcagctgtctagaggatcaagagggaaataagaaannnnnnnnnnnnnnnnnnnnnnnnnnnnnnnnnnnnnnnnnnnnnnnnnnnnnnnnnnnnnnnnnnnnnnnnnnnnnnnnnnnnnnnnnnnnnnnnnnnnnnnnnnnnnnnnnnnnnnnnnnnnnnnnnnnnnnnnnnnnnnnnnnnnnnnnnnnnnnnnnnnnnnnnnnnnnnnnnnnnnnnnnnnnnnnnnnnnnnnnnnnnnnntgaggatgaggacctcacggaggatgaggagggggagattattgagcccatggaaaaacgttccttaaaagtaccagaaaaacagcgccctaaaatggcaactgtaaagcaagggcaccgccctactgctcctcccccctactgctcacaagaggaagtaagagctcctggttgttccaccttctgtccagaagtgtggcatactgttcgcactgagttccagattgctcgaccactggcttatccagtttttatggatggtaaccaacagagatgtcatgagccaatagactttaaaatagtcaagctctggcagagttggtacgcacctatggggtgatggcagctttcacagttgcccaggtaaaagcactcaattgcttcagtatgacaccttgcaactggatgaatttggtaagagcttgtttatcgccaggacagtatttagattggagggctttccaaattgaatttgccaatgatcaaggtacggctaaccatgcagctggtcatccagcctgggatgtggacatgctttttggtcagggacattttgcacagcaacaaacaggatacccccctcaagtgtatgatcagattaaccaaacaccttctaatgtcatttttaaaagaacatccagtcgtttttccaaaaatgactgcagctgctcctattgttggagccccaaacattttcactgatggatccaagacaggctgtggagcctatatgatagagcatcaggacccagtgtgctttcaatatcagcctggctccccccagattattgaatgtaaaattgtccttgaagtgtttagaaattgcccgttcccctttaatctgatttctgattcggcttatgttgtgaatgctgttagggccatggaggttgcaggacctatcaaacctaatagtacagtttgcatactcttacaggagttgcaaaagttgatctggcatcgcgatcagaaattttttttacaacatattatggctcataccaacttgcctggacctctatcaaaaggcaatgagatcgtagatcactgtactagaggggaatatgtattttttgcttcccctgtggagcgggcacagcaatttcacaaacaattccatgtatctgcaaaaactttgcaacaaaggtttcaactatcccgagcggaggctagacagataatattgaattgtcaacagtgtataacctttttgtacccccctagcgtgggggtcaatcccagagggctattgcccctgaaaatttggcaaatggatgtaacccatttttcagaatttggaactctcaaatatatccatgtgtctgtggaacctgttcaggcatcatccatgccacccctatgagtggggaaaaggcttgaaatgtcattggacattgccttgaggcgtggactgcctggggaaaacctcagcaattcagaactgacaatggccctgcttacacagctcaatcttttacctcctccttaagcagatggaggtccaattaaaccatggcctaccttataatccccaaggacaaggaatagtcgaaagagctcatgcacattgaaagaatgtttattaaaacaaaaagggggaataggccatggtagaacaccaaaggaacaagtatgcttggctctctttactctgaatttttggaatttggattctcaaggcctttctgctgctgataggcaccagactcaggcccccacctggaagggatatgtcaaatggaaagatgtaatcacgggtctatgtcatggaccggacccagttttaccatggtcaggaggttctgtttgtgtttttccacaggatcggcaagatccggtgtggattccagaaagactgatgagacggtgcaacaaacaagatgaagcctccagtattgatcctgctgatgagtctgatgtctctgctgctgatctaggccaggccacaaaccctgtgggccatagctaaagcatggccaattcctttacctgttcatcatacatctaaagtcttacctgccttcttctctactagttgtgatttgggtctgccctgtgtgaattgggatcctgacactgcccagtattcagccactaatattactctccatgcagcatttacttcccttgaaccttttgcggttctccagaatctcaccataagacttcttaatgtatctggtactagggatgagaagggaccttctcttaagaatctatcagtacataaaactttggataatttcactgttccatctagcccagtatgtttaaaagctccctttttctttctgctctctaatgctactaatgctaacaaaaacgtgatctcgtgtaattcgactaacgtctcctgtattgctagtcaatgttggaatggtactgctaatacagcagtagtgatgagggtccctacgtatgttcctattccagttaaagtggatacaggaacatttcccattacggaaatcatcagaaccaaacgggattttggaataactgcagcattggttactgccataaccctttctgcagcagcggctatgactgctgctattgccatggctgcacaggttcaaacagctgagatagtcaatgacattgttgaaaacatggccacaacattaaataccttaagatctattgatggccacttaaaagctggcattctaactgtgaaccaaagagtggacctgttgcaggagcaagtggatgatttagtaaccttaacttccataggatgcattcattccttttcttnnnnnnnnnnnnnnnnnnnnnnnnnnnnnnnnnnnnnnnnnnnnnnnnnnnnnnnnnnnnnnnnnnnnnnnnnnnnnnnnnnnnnnnnnnnnnnnnnnnnnnnnnnnnnnnnnnnnnnnnnnnnnnnnnnnnnnnnnnnnnnnnnnnnnnnnnnnnnnnnnnnnnnnnnnnnnnnnnnnnnnnnnnnnnnnnnnnnctcttaagcaagcctttagtttagttaaggaatgggatggggtgggggttatgctttccatgatgttgttagacatttttgtttgcctgtggtgtctatgcaggatcaggaagtctcaaaaatcccaagttgcaatgttggtacaggcctttgctgctgtggaaacaggacaatcccctcaagcatggttatccatgctgacagactaataggtgtctgtctcgcccttattgagtgagtgatgtatatctgaatcagtcatgctcaatgacgggcacctacccttttgctgagtgaataatcatacatgtgttcccttcgaccttaaacatgagcctgtgagggcgacacagtgactctttgacgggtaagatagggacactggggttgtacctaagacagagatgactgaaatctgacaacagatagatactgatactcctataatattaaaacaaaaagggggaactgttgggagctgcagagtaccgagcctacaagatggcgccagtctccaccttctgccagcccaacggcgagtggtctctatggtaaacaactcctaatttggtaaaggccacgtatcctcttaattctgcttggagacaacccatcctggtgcgccatgtggggttaggtgattggtagttgtaggctatatcaggccccatcttcctctacccggggccactccctgtaaatcaagtttcccaagtaaaactatgagaagaagattcctgggtgtcacgtcgttcttgctcgtcaagggtggtctcaacaggaactgcacttagatcctctgcatgagcaacaaatgcccataatcaatgagccatctatctcttggggctcaatagtattattttattagcaacttcctatgagcatcaatccctatccctcttaacagacaggaatctgagacttgagaatcatttatgatgattggaatcacaagttagtgagcttggatctaatcacagtgagctgtattctcagacctgaatgccagaaaccaatacttttttcttcactatctttatctgtgtcttcttacaaaaagggggaataggccatggtagaacaccaaaggaatttggagagacctaggctagaagcagatcagatccgaatatgttgttttggcttgtcacagtgcagtattgagacatcatttgggaaatcttcagaaaacaatggattctcctctgtccagaatcaggagcaagtgcctttctatcttttcttccagggttctcttttccaacattggccttacaggccatttgttttcctgaaactatttcatttccctttcatccttgtgtgctgaaatgaaagtccagagcagttataaattctgtggctagtgaaagaatccatccccttgaccagatattgcaaaatgagctcctgaattgtggccatggtagtattagcactatcatcaggtccacaacagagtaagaaaataatcaagagttggcaccatcacaggcagaaaagaaggaatgtaggcacttaacattgtatagaccagtcccaatcctagaccaggctatgttgaagccatggttcttgtcacctttttgaagcagtcttcattttatagaaactctacttttcttcattcctgtatgttcagagaataaactacttgtatcaaaggtcaaaatggagcatgaactcaagtcctaatagccattgatagtttccagttgttaggggatggcaagatgcctcagtggataaaagtgtttgtgtcccaggcatgaagaccaaagttcagatccccagaatcaagaaaaaagtgaaggatggtcacaaacacctgtaactttagtactatggcagatggaaataaaagaaacactggggatggctaacatccagatccacttcaactttagtgagaaacctggtctcaagggaataaggctggcagaaacataggaaaatacctccattctcctttgctttccatttatatatggcacctgtactggtacagtactgcacacacacaagtagtgtgttttatgtactcaatagggttttggcaccaccacagaagctagagtcatttatgaagagtccacctcaactaatgaaaatgcctccattagatttcccataggtacagctgtagggtactgtcttgattaatgattgatgtaagagggcccaggtcttgggttatataaaagtaccaagctgagggttagttcatgaagaacaaaccctccattgtttctgcttcagttcctgccttcatgttcctgctttgagttgttgcactaactttccttcataatgaactgtaagcatttaggctaaataaacactttcctcccaaagtcttgtttatcacaatgacaaaaagcaaactgggacagtatgtaagtgtcaattcttcacttcactcaaagcttctagttctaacagtctgaacccttgaatgtacttcctatgttctcttcaaggtttaaggctaaacaagaacaaagtactaaaaatgagattctacgtccatttaaaagatgagcactacattactttaaattggatgtaggcatacaagtggctaaggaacactgcatttggtaagctcaaagtaagcaagccactgattgggttgtgttgcaaaataagaatggcactgagatacatgtttagaagaccttatgtgcatctcatatttgtttaaaagatatactatagaccaacaaagtagtctctgagaagcctttgcattgcctcattatgtaattccttttttctaatcagtgatctattgctgtgaagagataccatgaccatgacaactcttataagagaaatcatttaattggggacttgattatagtgtcagaggtttaatcccttatcatcatggtgggaagcatgacaatgttctgctagacagtgctggaaatgtagctgagaattatacacactgttccacaggcaggattaagagagagagactgggtctggcttggactttggaaacctcaaagcccaaccccagtgacacacttcctccaacaaagccaacaaagccacacctcctaatcattctgtagtagtgccactccccagtgactaagaattcaaatatgtgagcctatgtatctactgggcttatttacagtaaaatggatgactcataggcagctgtggtactactaagtccattccagcctgagggcagcttgaacaacctgtgtccatggattttcctgactaatgtgaaggcagctacttagaaaattctacttttcccagcaatgctttactgtttgcataaacatggagaggaacattgtgaattgtgtaactctatgagctaatgaagtttctggcctctgttcagttaagaggaagtagctctacaatatcatctcatcatacaagctttataaagaataagtagacatatctgataacaaagaactaaatggaagagtatttcggtaacttatttcaagcagatgcttattagcatttgtgtatttcttgctattgttttcctatggtctgcttcacaggttatcatctcccccatacctacacaaaataggtgtcaaaggaaaatgagaatattcaattaggttgaacaaatattgaatatctacaacagattgcaacaattttgcatttcctcctgatacactcatgagtaaagttgtaaagaacttatccactgagcacatattctcttagatgacccaggtggaaatatttacaaagaaatgtactatattatataatattacattatatatacttagaagaaaagcaaactttgtggtctcccacaaacacaaagttcagcattcagatctatacaatttattttacctcaaataaaaatcaagtataactgcagaacacatgtaaatgggggagaatcctaaacaagggacatggaacaagtattttccagttaaatgtgtctatagtgtgttttccctttgtgtttcatgtatctgaatagttaatgagatacaacacaaacagacttaacagtattagtacccttggcaacacgtttaagagaaatcagctggctgggcattggtggtgcatgcctttaatcccagcacttgggaggcagaggcaggcggatctctgtgagttcgaggccagcctagtctccagagtgagtgccaggatagtctccaaagctacacagagagagagagagagagagagagagagagaaatcagcttcacccactgtactttgtcttgcgttcacagcacagatatggatggtgagcatctgtgatattgggcattgggcatttcatcacagtctagcccaaaacaacacaacatactgctttaaagcatctctacttcttcgtcttatctaaaattctgccgttttccaactttctcacaacaatgtttttctgttttcaaagttaatgcaccgtatactgtgtcatcaattgtgcaggaactacaaagtggctgctcagaaaacaccccttcctaccattccccaaacagtatttcatacttatgaaattgttttccaatgggaaaatcttgctttctgttcagaaggagctgtggtccccagcagagctgtatgtgggcacacatatacaaacaaatgcttgtttctttctgctaatattgtcccattaatctagcatttcccatacagcttatatctgctcattgagacattttcctgttaaaatctgggttcttgtttatttttttttcattttacttccatatgagaagtcagaagcacagcctctaatctgagacttttatgtttttttatgttgtttttaaagcaggtatcaattatacagttatttaatttacagaccagcttagttttattctgaatatagtatttatagagtctgaagatgcttttgttttcttcaaaactgttggggaaaataataaaataaataaaattgcaataagatgaaaagtatgagcatgtcttccttgtcacactactccattttttatatgtctgacagagcaattgttctggaaaacaaatgattcttgtcacttcactgattataaccattccagtggccacctatcaccctggagaaaggtgtctaaaacatcccagcagagcacgagaaacccaatatctgtaattcaggttccatctgtgccaaccacaagtgcattgcagaatgataagcaagaatagcagaacatgtagtgtcccactatgtgtctcattgcctagaaagatgcttggcatttacctggacagggacttttatatttcaaggcagtttgaacacccttcccccaaagaagggtctttgaaatcataatcttttctcaaactattcttcagacagagcctgtaggttgttcttattccttgcttttaaattgtttgccagtgtctacctcctccttgagagccatttaaatatatttcttctcttgcactttacacatctttattgatgggggatgtcctccagtatgctttgaatatacgtttctctaattggttgatgaagaaagctgtttcatccaatggacaagcaggatttagccagatgggaaagccaaacagggatagagaaaggtagtaggcaagtcaagaagatgcaatgtagctgccgaggaagaaagagtcccaggcttcactggtaagccaaggccacaaaaagatacacagatcactagaaatggtttaataattaagagagagctagccaataagaagcctgagcattcagccaagcaatttataattaatataatcctccaggtgtttgtttaggactaaacgactatgagaccagccgggacaaaaacttccatctacagtttatctaaactaaaagaataaattacagggctggagaaatagctcaatggttaagatctcttgctgcttttgccagtgaatcttagtttgggatttgatgtcctcttgcagtctctgcatgcaccaggcagacatatggtgcacatacagacaagcaggcagacacatccatataaataaaaataaatcaatttaagaaacaatctaataaatgtttaataaaataatagtaatagtttgtgctgaaacttatttcacattaaactatttagtatattacttcccaaaaagctaaataaattaatgctaattcgtttatttaaaagtttttggcaagttatgaaagaatgcattaacatatgttcaataatgacatagtaacaaaaatatttttaatatgcatacacatgcatatacatatatgcatatatgtataatatatacatacataatatatatttctcagtgagatgtgtatacaagatttatcataaggaactgctttactgtatcacacagttaatccccatgtcagttttgtggaaaacacaacattggaaatatacttgtcagtgctgatcccaaatggcctgctcctcctctgctatgcctggagtaataccatgtaggtagagaaccccataaaataattctactggcagagagatgaagagaatattttctgccttcaaagtagtatttgctggggttggagaagcaactcagcagttaaagagtacaggattcccttccagagaacctggttttgttcccagtacacccatggtggctcataactatcaggaactccagatacagaagatccaaagacctcttctgactatatcagtgccagggacacatatgtatacatgcaagtatgcaagcaaaaccttcatatacataaatcaaaaaagacataaatcattataaaaggtgtatttattataacaaactaaaatagaaagtaagttttctatccatttaaaaagtagaaagtgaaagtttttcccacattgggatatggaactttgggctgtctaagccatcaagagtaaagttattttatactatggtagagaaagtcctaacatgaggtcttcttgaggaacataagtttggtaaaatacaattgacaacagtcacaaagttctgggtaataataaatggctagtagaaaatttacatacagaagttattctaggtcaaagtatcccacctctgacagtttctttcaaaatatttattgcctgtgatttccatattattaataacaatgtgtgctggctaattttaggtcaatttgatacatgctggagtcattgaaaaggagggagcttcagctgataaaatgtctccataagatcagactgtaggtaagtctgtatggcattttcttaactagtgattcaaatggataggctactcattgatttggatttctgggctctgtgagaaagcaggctaagaaagcaaagtggaaagaggagcaagtcagtaagcagcaaccctccacggcttctgtgtcagttcctatcaccagattcctgctatgttgagttattgttctgacttccttcagtaatggagtatcatgtggaagtgtaagccaaattaacctctgtctccccaagttgttttgatcctgctgtgttatcactaaatagttgccataacttagacaacaagttgaggtttactcaagacagagagccccaccgtgtttagaatgaagagatttaagccaagatttcatcacatggctccctttcttggtacagagaaactgtgagtttattcatgctgaaaagaaggaagttggtataagaaagagaaatctgtctgtaaaatcaacacatgtcagtgacaataggtttccttagattggtaagaaagcataacatggaaaagaatgagagctgcatttctctgatgaaactccacatagtttcaagtgtccctgtaaaataagatcttggaattttctagggagttctgttataatcacaatgggtgtttctggaagacactgacctttcacaggtgtgaatgggttcattgtttactctgttctacaggagaattctctctatttgcatgtgatctttaggcaacatagtcatattttctatgagctatctacatttcccccaaggccttccttggtttatagaatttctgatgtttgctcatagaatctatccatattattatccataagtattgtgctactagaaaatttcttctctttgtatcttcctgtttctagctgcagcccaaaccctttgttcggagcagaggtttttaacctgaggattgcaaccaatttgtgggtcaaatgacacttgcacaaaggtcacctaataccatcaaaaacacagatatttacattatgattcataacaatgacaaatattataattattttattgttgagggtcaccaccacatgaagaactaagtgtactaaagagtcacagcattaggaaggttgagaaccactggttgacagacatgcttgtctgtggtctcagtactgtgtatctgtctctcatcttatttttgagggttatcatagaaatagaattatctgtagaattattgatggaaaagataaacataaaaagaaccatttgaggtaaaattttaaatgcaaacactcttctttattagggaaaaaaactaaaatcagattatcctgttaaaactcttggtggtagtgctttaggcaaaagttagtaccctcctttatatctaattgaatatggactgagtgacagtatttgactaaaataagtgtttgctaacttatttctctgcaagatttgctattgtcagtgtcagtttttaaggcacttgggactccatattttcatttagtcaacagaaaatagacattccattatatatattacaatttttattattatatttactatattatatttatttggaaatatatatatatatatatatttccaactgatttttaacagaagaaatgatactttataaatggtgctagacatccactttggaaagaatatatactaggtttttggggttttttttcccattgatccctggaagggggagaatttctccctcctcttctcttctttcccatgtctgtctctgtgtctctttacctctcttctctttccttcccttattttcttacctccccctcaataaaacttccaatatgaaaataaagaatataggcatagatcttatgttttgtatagaaagccctaacaactcagtgcctgaagagcattatttttagcctgatgatgccatgactaatacagaactgagccaatgctgctgcccagtaccacagatgaagatcacaagcacagggcaacatcaacattagagtatgctctctctccactgaactcagagtgtgttgaatctttgtagagtttattctggactggatgatttttacccatttgattcactctcctggtttgagtctgccactagcatctgtaaggcaggtggtgtttaaatgcatccacggtaatcatataaaacttcgcatgggtcttgagcctatgtatgtaaaggctgaatagtgttagtggatgggccaggaacatgattcaggggctggcctgagtcctgagtctactctagctagcaaagggtggtacctttcacagaggggcacttccaagcactgaagtctctactaaactggactttgttactgtgtatattgtggcatagtcaaatggagatcattcagcttctgggaagaatattgaagttggaacttagggttttgtctataacctagacttatatgtactggcctggttcctgataacaatgaatctggattagtttttagaatcatttagactcttccatagggacttacctttcaggttggatgatgtctggcttggaacttaataggaattctttcaaacaataggttgattcctgggaacatcttggaacctcaaaataaaagaagcttcagtagtggaagtcaggttaacactgttgatactcacagaaaactggattctgggtccactagaacatgggactgcagaagccaggagagaactgagccacaagaagtagcccagcctgatggctctgtgagaattcatcaatctcgagtttggggaattgagacttaactgacattgggcttttattgggaaaggaccagtgtaggaatttgagatattatcagctttcctccatattgttggtgacgccatttccctgtgttctgctgtatttgttatggtgttatgagctgtggtaatgtaccagacaaaaataacttcaggattggtgttctggttttggtttttcatttggtttacagttccaaagtacagtataccatgatgggtaaataatggcagcaggcatttgaggtcactggtcacattgtctctaccaatatgtcttaagcctggagagaaatgaatgctggtgctcagatcatcttctcataattattcagcttgggacctcagtccacaaggatagttccaaccacattcaaggtgtgcctttccattgtaattaagccaacctagaagacaaatacagacgtgttctgatgtttgttccaatggagattctaaatccattcagttgttgatcaagacaataacaatctctatcagccttcccaaaactctgggattattgtctataaagagggagtgtactcaagtccagcactccccatcttacacataacaaataaaatataaagaaaagcatatataatggattaaaatgtagaaaatgattagatttactccttctcattctctcttctcatcctcattctgtaactctgcttttttaagtgccaaaggatatcaaatctagaacatcccatcagattaacccggtattaaaacaatgtgtaacttacctacctaaaatctaatgacagcctttttgttgttgttaaagttcaatggtcctatacaagatgcacatgttctgcctgcagttgtggggaagcaagaacagaatcccatagttccttactgaaaaggtaattaagtcactctgatttgcacattgctttttgttctagattcttcacatcatgtataataagaaagcaaaattatcagtatatactaactttatgatttgctaaactctaaagattggtatcccataggagagtaggtgttcagttacagatccaaaatacaatataataccatgaaaccaaatactgaaagctacagagactgataggagttgttgagtatatcatacctcctttcacatggtgtgactagactatggacataggtatagattagcttcatttatttaactgagggaaatcccatccttacctcatctgtactgggcaattctcagatattagtctatgtggtgatagcctgaaatgcagaaaattcaaattaatgatgtacccttctcccacataggatatattcagttccatgtcaggtgggggagcacctagttaagttaaatattaactactattattgggcaattgtctctcaaaaaaaaaacacacaggtatggacatggttaatttgatatctattattgcactttagtttctccttctgttcttttgtcttccttcctcttctccataagtgtccatcttatggtagctgccagtaaacacactaaacattaaaactggccttatattttgttatatagaaaactcagctggggaagaatggtccccaaacatactagctttacttttgtattaattttggatgtgcacaagctttagaagaatgcagattttctcataaattattcaccttgcttccctcaatgtaaacagagccacggtgcaattagaacaccaaagaattaacatcatttaatataattaaacaataaactgtttttgctttgttgcagtttttcattcacatccctttataattacatgaactaacagaagacactattattttttaatctccagttgcttggtttttcttgtcttttatattttaattcttttgaggaggattgctctaggctattttctgttcctgtagtaaataccacaaccagaaataacaggagaaagggacttatttggcttcctaggacatattctatcactgagagaggtcaaggaaggaattcaagaaggaattgagccagaaaccacagagtagtttactcaccttgattctgtttcatgttcatttagctttctcattcagctcctactctcctgtctagggatggtggtgccagcagtggactgggccattccacaccagtcatcaataaagataattccttacagacatggccactggttaatgatcaataaaatacaccagttgagacccacacagatgactctgggatgtgtcacattgacatttgtatctcaccataatgacagtcaacaatctaatcttgcaggaatacattgtgatataggaacttgtattttacatttgtctaaccccttataacatggctatttaatgacttacaggcataatgccataccctacatgatgtgatcataataaatattatttaaaccaaaggagagtgtagtaattctgtcttagtcacaagattcattggtcataacacagagcccactggacagaatctcaaagcagtttggaagataaagatgagggtatggtggtatcttaagagttagaatacacctagaacaagacttaggtggtaagttgattccctcatatatgaaatcctaacacttagaacaagtacacgatactctctctggaaaaatataccagctaaaacatgggatgagttgcagcagaactggttggaattactttttggtttaaggttctcccataagaaattatgcttccctaagttcaacaaatgctgttgcccagtagtaagtggagaaatgcattgaagtagagaaagggtctgaatgccacacaaacaagaagatatgcagatactgctgcaaggaaagagcagacagtggattctaggagtaccatggcagatgtcctcagctgtcagccatagcaaaaacaggcctgaaatatagatgcttttataccctcaacacaaatgtttcctaaatggctccacactcagtgacttagcagggttgtggtatagaaatgtaggcattgtatctaatatgagtattttatggtcctccttagctcacaaccccaaaaggccatcagccaatgtctgaaacagacttacacagtttagacttttgtctagtaaacacagctttcttcaaattcccttcacaggtatagacaacttataaaaactcctgcaccctgaattctgagtccatttctacttcaaagtgatctgatactgacagaatgggctaacactgtctactgaggttttagccaggatgtgaaaccctttatctttcatcatgtatttatttcagctcatagaatatgtatagaggtactacatgacttctcataaatgtttactatctatctcctgcttattctgccttccagcataaatccaagaaggctgaggctggtgttgactgccactgctacagacaggatgctttgtggatatcaggtgagtcacatctatgtatgtcaccacttaagcaaaaccccttaaagtgtgtcccagccactaggacagacagaaccttaagatggtgcaggaaaacaacaaaaccaagtttcattagaatgtgtatggatacaacttttgatgcctatccacccccctctctctatggctcactagtcttgtagttatagccttgaggtactgttcatagacccagggaaggttgtgaatgggaggaagctgttcacactgaggtcacacaatttcagcattagatgcggttcacaagactaaaagcttttctttctttcttttttttctggctatccaggcccaggtctaaccagtacatcattatgaactcattttcccaatctattcatttctcagtcatcatggcataatacccatgtgagctgaatatagatgtttttgcatcttttacactgtgttttggtatctatataaaaataggagacatggcaaagtttgtatttttctatgccaaacagatggaacaatacatattattgtgtacagagagcagcatggaaaaataaatcaaggagcaatcaatgcatattgagtagatttgtgttttgaaggataaacacattatattaaacattcaaaaatttttgagatttaggaattttatacatatataagtctagtgactcatacaatcacatattttttgcagaaacaataggcacttttttgtgtgactgagtgggtgtgtgttgtcatgtgtacacatgcatatgtagagactagaattggtatcaggcatttttctcaaatgctctgtaccttattatttttatcaaggtccctctccaagagctcaccaattaaattaaattccctggcaagaaataccaagagtccttcccaactctaggattacaagtgcatgccaccatgtctgacttttatctgggtgctaggaatcaaactacaatcctcatgttagtatggcaagcaaatacaaaatgtatttttttaaaggaaatattaaacagtctttcagttatattgaaagtaaatgtgtgttcataatgttgccacacagactatgtatgttgttatcaatggaagttttgttaagtatagtgacaagactatctcaaatgacatcctatattactatacatgtatttgtcaaagctgaagtctatatgaatccttctcctcaccatttacaatgaaaactgatcattctggctggagagcaaaggcatgctagtgagtttgtgaagtagaacctaaaattccttccagatttgggaagtacacacctgtccatacatccagtgtgggaaaataggtttccttctggtggcttggaaggcagatattaggtcattgtaaagatgacaattatccataatttaccaagaaagatatcacgctgagcttttgcctggagctatatctgtcacactctaacaaccagtataaatacaatacataggttcaaacattcaacaacaggacacaattagatttttattcacattgatcaagcatctcctttgcaaaggagaccccatgatccagacattttctatttaaggtacagtatgtgagattgatgtggctttaaattttatagtggaacagtaggatagaatctaaaatgtcaccctgaggaacttacagtcagacttaaacctgtcattcaccaccactcctcatagcatcacattgttacagcccagggataaaatgcaaaagtccttgaaggaaaactgggtagtacagtttcctccatgttcaccatcagaaatgtgatacagtttcctagatgttcacaatcagcactgtgaggtacagttacctagatgttcacaataaactctgtatggtatagttccctccatgatcaccatcagaactgtaatgcagtccctagatgttcacaatccgaactgtgatacagttccctccaagttcacaatcaaaactgtatggtagttacctagatgttcacaataagctaagcactgtatggtatagttccctccatgttcacaatggagaactacggtacagctccctagatgtgcacaatcagaaattcagaaatgtgtggtacagttccctagagcatcacagttatctccatgttcataatcaaaacaacacacacacacacacacacacacacacacacacacacacacacatatagaggaaatgaaaaaatcctcaatgaatgaattacaaggtttctaaaattactagaagactgttggatttttcttccacatttaaagatgtgacaacaattctatcatgctgttaagggttataaaagacattacctgtaagatgattgacatctaatctggaacataacagattatcaatacataatagtggtcattactaatatcaccctaagaattccacaaattttgatcaaatatcattgacaaataacaagaggcctgcaaagattgtctgtccaactctcaacaaagtccactgggtgttgggaatgagtaggagaaggatacaaactcataaaagtaatacttatgttgatgtagttgtgtttttaatggattttctagtcaatgttattaaattttgtggactgcaaagaaaattgcaatagaaaaatacaacagaatatgacaatataaaatgtaaatcatacacagaagttttcagaaaattttaccatgcaaaataaaactaatggtattctgtgcactatttagttttttgtcaacatgacacaagctagagtcatctaggaagaaggaaactcagttgagaaaatgcttcaatacaaagattaaaaacttggtgtcacatgcctttaatcctagcacccgggaggcagaggcaggcggatctctgtgagtttgaggccaacctggtctccagagtgagtgccaggataggctccaaagctacacagagaaaccctgtcccccccaaaaaaagaataacaaaaaaatgactcatacaactcatactcattgaaataaacatgaacctaagtaacagactgaagtaaagggactcagcaagagttgggagacaagtaaggggcaaatgtcatcaaaatacagtgtatacatgcattaaatgtaagaaagaaaacaaaacccaaacactccacactttctgtcttgtctgtattatctgcttacaggtattcaatgagatagatgagatagtcaataatttatgaaaatagcatatgccctgttaggtgcccaactgtaggccactctaagatcatttgaagtaggctttgctaaaccataactatgttcaaaatgggatgtgggataaatatatattttacttatattttcaatttatgataggtgacctatatagaacatcactggagaccaagcaacattggcacacaagtagttatttgtgtctaggccacataacaccactttctttttatgacatacagatgtgactgagggttgtggactataaataatatgttttgcagatgatggacttccgtactccccttcctgggtgcaatttttgttttcacaggtgcatagtgaagaatgactgcagtccaagtacaggtttcttgtgctcaacacatttggaaagttcatgaaaactccagctgaccagaaattatcccttagctctctggagtgaaggatgatttacactggtcatgtgggagacaactgtgtagagatgacatgctgccagcttatgctcaggtgagtgtatgtatattctatacattttattatgcatcatttcaagttatgtatggtgccctggtaggaaagaaagaatatttttgtctcagtgattcattggtcctcacctgtgagatatttatcactaataattaaaactcagatcctttgacaataaaaaaaaacatgggcattgttgtttacatgagatttgtgcaatcctctattgcagtggctctcaacctgactaacactgtgactctataagacagttctttatgttgcaatgaccccaaccataaaattgtttcattgttaattcataactgtaatttttctactattatgaatcacaatgcaaatatctgatatgcaggttttctgatatgagactgctgtgaaagggtcattcaactccccaaaatccgtgacccataggttgagaaccactgctctttcaatcatataatattgtagagatttgtgggtctctgagcttgcattcggagtcacaaataaaggttgattgcaagattctcacagctaggccaatagtttctgactggtatatgtagacttgtaaaatatactgtggcatggtctatgaaaagccgatggtaattcctactaccttctaacttagaaagtcttaagcctctttttcctttaatttatcttattgagggttttgtttgtagtcattgttagcaaagatgtacactctgtcttgtatacaatttttttaaagattttattcatttattatgtatacagtcttctgcctgcatgccagcagagggcaccagatctcattcaaggtgtttgtgagccaccatgtggttgctgggaattgaactcaagatctctggaagaacagtcagtactcttaaccactgagccatctctccagcccccgaaatgttgttttttatgaaaggagacattaatgacccacacagagtagttgagatctgaagtttacatataagttcaattcatttattggtgtatattcattgtacataatattgggattcaaacagatcattacttttatgtgaatcaggaacttgaactatatttacacccttatgtaatcccacacttaatttgaccctcccattttcccttccccactggtctcataccttctcctagtctttgagtgattatatatatatatgtgtgtgtttaagtaagcaaagtaagcataaagaattctgggtcttataaatgagagaaaacataaaggattagtctttcttcatctgactctcttaatatgtagtctccagctgcattcattttccaggaaatggcaaatgccatgcttctgaatgactccataaaactacattgtttatatatacaacattttcttttcatttgaatctgttgttagacattaggctaatttcctggctatgatattgtgactagctctgcagcacaggtgagtgttgaggtatctctgttgcaggttgccttagagtatgtgtaattaccatcacgtaagatgttacctgtgggaattttaaaatacgcatctttaatcaggatgcagatggtgcctacaattcatagaatgttgaggattttcatcatgaaaagttgttagaaatagaaatcctaaaaggattttattcatctcttgagaggctgctgtggcattttcttttcattacagtataacacattggtcagtttttatgttcaaaccatatttggtttctgcaatgaggagtaattggacataacttttatgtgctactcccttcagtttagttcactagtttgagttttgcatatctatatttaaagcatatatcagtgtgaagttcttttcccctatgaatgtgtctatctgcttcaatagcttcaatattagtgtgaagttctgtctttcctatgaatgtttctatatgcttcaatatgaggtaaggaacagcttttaaacaaattaggcacattcttgtatctataattttctgtgttttgtgaagaattattattgtgaatgcttgataaaatttattgaattatatgacattaatatagggctttgtcagtgcccataaagttggctccactccaacttgtctcaagggcagagagttcaaaactgtcctcagtaagtcataagacctaaaggtcaaaggtgtgactacagtaggatgtttgatcttggccttggctatcttatctaaataacaacagacctgatctgaggtgtggttactcctgtccttcaaggccaggtaacaagaagctgaatctaacatttggttactgagtctttggagaaatgaagaataaatgtctgttctgtatacagataccacgttcccctttttagttatggtatgaattgactgatttgccctcttgcctttattctatgttggtgtcttttcctttaacgtctttacgtagcctttcttcagtccacattcccactctcaggtacaaaacatgggctccctagctggctctgagtgcagttctgaaaagacagcttcccacaggacttcaagttttgtggttccctttattgttcactaattcattctctactgttatgggttaattacatgttattatattatagttttctctttaaggtcagtattaagctaatacaatcaggaatgaacaggtacctagttctccttgtttggtgtacacacatcaggtagtcagagaatgacatcagatgtcttctgggatttgctctctacctttttgagtcaggatatctctgtgtacctgcagcttgccatcatctaggcgagttggctcctggaatcaatctaagatccctagtgctggtttaacaagcaggagctatcatgaccagctttcatgatgatactgctgatttaaacacaagttttactactgaggcatttccttggccccaccttccctttatggctgagtactattccattgactatgtaccacctttcctcttttcttccttcacacaggggtggacacctaagctgacttcatatcttggttgttaccactagtgctatagttaacacaggagtgaagatatccttcacccagcaatttattttatgtaggtaaatgcaagtggcatggctaaagattatcatagttctccttcagtttgtaacctccacacctcattgtatgagtgctagacaaatttacaggcagatctatactatgcaaggctccatttccttgcaatcacttcatcatcttagccaatcttgctgaagttatactccatctctctgtattctcatttttccttattaatgaccaggatgtttccatatatcttttggttatttgtacattctttctagggaaagttcttgttagggtttttgtgggttttttgtggtttggttttttaaacttcatacaattcaaatttttactctggctattgatttcctaatttattatagatattaaactctcataatatatgcatgtatacacagacacatacacagtctgcaaatatttcctctctgtcattttcttgattgtgcttgctacaatggggagacttttcagtttagtacaacctactggtcaattgcttttctggctgtgttttgacaaattatccgaaaaatccctccccctccataaaagaaagatgggctggagagatggctcagccattaaaggctaggctcacaaccaaaaacataaaagaaagaaaactagaggtaaatataagtgaactccacagcacaaaaaccaatgaaagatattcctgtttctttgttaacttcaagttaactggtaaaatcaggaaaccattctatttagagctcaaaagaaaacacctagacattcaccaaatagagctaaaaaattgacaaagaagcatttagaataagtgaatagtgtttgttcattggctaaaagaattggtatttttctctttttagttattctttgaaaatttcatgcatagatacagtgtatcttgagtatattcacttcaatacatgtctctaacaattccatgtcctttatttttttaaactatgtaaattattgagttcagtcagcacagtccatatgtgcatgactgtgggtcaataccaagtcattgacaacctaccaatggcatgttctcaagaaaatgtgactctccttcacccttggtcttcttgtcttttactacatcaatttggtggtattttagactattacttggtagtgtattttgaagacagttgtatctgaagcttccagcgatgttctttattcagactttctttgggtgctcactaccttttatgattctctgtgaattttaagaaactttgtccttttaatattaaaaatttccattgaattctggtaagtgctgcactgcatctatagatcattgggaaatcagttcaaaaaattcttcccatcagttaagaaaagttgttttccccattatttctgtcttttcaatatctttaagcaaatgtttgtaatttttgttgtatgtcttctaactcttttattaatttgtgaagtatttgaagtttaagttgctattgtaaagaaaatttctttgtttgtttttctgattatttagcattagtatacagaaatagattaaattttgtgtattttactttacaccaaacatttactgattcaatctaccaaaatctaattaatgagaggataaaacatttttctgaagattaaacactggaaaaacatgaccaaaaatatcccaaagcagtacatgggaaaaaaaataaaacacacagcagaagttgataaaacagaaagagaatccaaaaaataaaacaaagcattgtctctttgaacaaacaaataagattgacaaggctttccccaaaattaacatttaaaagtgtagagaagaacaaatttgtaaaagtagacattacaatagacaccagggaaattcagagaatatgacagacatatttttaaaatgtatattactataacctcaaaatctagatgcttatgacatatcaaaattaaaacaagaataagtaaataatttaaacaggcttaataacaagtgatggcatagaagtagtaatgaaaaatcttccaaggaaactctaaatccagatggacttggtacaaaattctatcaatcttcaaagaacaccaatatgccacaaatgattccataaaacgaaaatgaactcataaattcgttttacaaagatggtattaccatggcaacaaaaccaaatgtagatgagaagaagagaatcaaagacacacagagcaagaatattgtacacaagttctagataaatatagaccctaaaacttttaataaaatacttgtctctgtttttcttttaattactggttccctcttttatatttatttattcttacttactcttaggatgatatttgtataggattttttcctttagattttctgaacattgtaaattttggtatcaactataacccagtgtacatgataacactttctacatgtctgttggctacatttgatgtctacacagatgaatttgtgtatgaagctttgtctttgagttttgtacagatgatctgttttattgaaatagggtattaaattatcatagtatcaatatgtattaaaacatgtcttctaaaatctattaatatttccttgtgtatcttctattattgggtacatgtatacttattatgccttttgattaaatgggtcttttaatattctatgactaaatcaatgatatagctcacttaggttttttagtatgatttggagtttagttacctctgttattgctctatttctatttgcatggaaaataccttttcatctttaacattttatttgtgaccctccatctgtatcatatctcctctaagcagtatacagtacttggatctcggacttttgtgggtcatcccggaaccacagtggcctattccaagcaataatagatagtctagcactggaccagcagacatccagagtttgtgggtgtcagattcatgccaaaaatatggcttatcatttgaaactcatggatctaaaaatcactggcgaataggctagaaccctgtgggctgtggctccagctccaggaaatgcagtgactgtcttctctccttagggagatgttcatatagactcctaccatatatacatgaattaaaaataaagagatccttaaaacataagagtttaaattctcaaagaacatcaccaccctactttaatgtgaaacacaattaatgtggatctcaatggagtcagaactagtttgaaaaacagattgtttatgaggaagtattcatgcaacagagccagtcctgtacaaccagatggaagagggaatagagagagccgtattcacgagaccctcatatttaaagccttgctacatcattctgatcatgcccaagtttgtgtgtggtcagagtctcctgtcccagtcccgaagtgagtgtggacagtgtcacctgtgccagccctcaagtgggcgtggtcagaaatcttatcaaggatgctggaggaatgcattctgtcttcctgggaatcatggaggaaatgctgaccacgcccagaacgcattcctccagcatccttgataagtgtttataaaatatatacattaagaaatcctagtcattggctaccagcattgtacctaatattaatctctgtgttttattttgggcaaccacgtggcaacagagctcagtggctagcagaaaattttattgttacaaaatggtgtcaggacatggttttatgaacatccacataaaaacttgacaaaagcttaaaaaaggattttagaagcaaaagaacatagaaaagtacaacttcttggtagcagcatttttttgtgtgtggtctctgtttgcaagagacaggcagaggctcacagctcctttatgagaagcttcctgactcagcctaagtgtcaaaagctgcagggctcttgctaagaattcaatggagtgtaggagcagcaggctccccaagccagcagcctgttgctttatagcagcatagaccaaggcagtgagcacaactctcagtgctggtggtaaacgaacccccaccatcttggaaagacagaacctaaaatagccactgctttcattttagcaatgtcggttagctaaaagaccaggtggctagaaaaaggtaaagatttacagtaaagacagattcagataaagaaaccctctaaaggtttacagtgtgttttaagatatatgtaggcttatgagagaaaagaaacacaatacagtaattgggagagagaaagaaagaaagaaagaaagaaagaaagagagagagagagagagagagagagagagaagccggtggtagtggtgcttgctggtaggatttgctgaaagaaacagaggcagatggatttcctggctcagggaaaaagaaaaaaatagaagtaagagaaatagaataataaataagtcacatgaagatgaaaaatacacagagtgtggataatatatactatattgttgtctttaaattgtttgattgctgaggaaggagcaacatctactaacagacatttcagtatcaatgtggttaaatagtccaacttacacattttaaaaatgctttgacttatccctagcataggaatggattttgggagcccatcccacatggagggatacaccctgagcctagatacaaggggattggcctaggccctaacccaaagaataagacagattttgaagacccccttatggaaggcatctccctcccttgggagcagaaagggtatgggataggtagggtgttagttgggggaggggcaggagaggagtggagggaaagggacctgggattgacatgtaaaataattttctttgtaattaaaataaaagaatgctttgacttcataagtctaaggagaggctacttgggaaaagaacttttgtttatgtttccatagaaaatggaaagctatggattccatagctaattccatagactaatatgatttgatcaaacaagaccctctgaagcagtggcccaactgatcctacatccaaaacagctgagatgatgtggttatagatgactacagccaggatttctgtgttttatcatgatccccatggtatggacatcaccccaaccagcaggaagcagtttggaatgaatgattcccaaattcccaaatattgtttataaatgtttgttttcatttaaatggggttggttataaatggtaatgatcacagtcaatctctttttaaataaaaaaagggaaatagaatatagaagtgaatactttgtattggtatggattttcatttattgatacaactttaaggtcaattttgtgatatgtatatttctcctcttgtttaggtattgtgttttacatatcttttaaaatgtaacacataattaaatatagattatatagtcacctataatagtcaaaacttataattaggttatttaggttttcgagatatacagagatgtatttagatggatagatattcttcaaacgtttcaaagccctacagaatgtatggcatttaaatggtttagtgtttttcatggcagtgagacacaactggctcctggcacaccaattacctctgagaggaaaatggtcgttgaagaaactcaatatggagtttgctttcaacattgcgagattaaccatttgggcaagaaactgctcttgcccagactgcttgataaactggacatacaggactcagagaaaagtgactgcttgtaggggaagctgtagccatgcctcctagggcatggtcatggtgacatagagtgagaggtggtcagatggctggtttcactttcggcttgctgtacagacttttccctgccggctggctaggtcactctgtaagtaaggctctnnnnnnnnnnctaggttgctctgtaagtaaggcttttccctattaaaatcccttgtatttctacctggctccatactggtaatttcccatattaactgctgaacttacaaaacaatatgaacagtcctgaaaagttcctgcttcactaagaagtctgccagacacactgtggcctattgactgaagatggatgccccaacattacagaggaactttgggtaactgtccaggtagcaagatgtctcagtcaaatctagagtttatatattatccttctgtggtctttgatggagttgaagacagatagtgatggttataggtttctttaactattataaaagataagctacatataagactttagactcacaaagataagatagatgatagaatattttctttaaatcttgctaaatgttaatgaactaaatatcataactatagttcttacttgataactgttttgttatatattttactatgttaatgttaaaaaccttctttttatttagaaaaaaggaggagatgatgtgggaggtccttctgtgtacatgtttatcttattggttgttgaataaagcactgttggtcaatggggagcaagataggtgggactagaagttgaagagaattttgggaaatgtagtaaagagaagtcttgtaatctaggcaggaagtgacatagcaagcagactcagaatataagcagggacaatcaagaaataaatctcttcctcctcctctcatctctggagctgccatgtgttcccaggaagcacatttcaccagcatccttgataagataagtctttataaaatatatagattaaggaatcctagtcattggcctgcagcattgtacctaatactaatctctgtgtgttgttttgggcaaccacgtggtaatggggctctggcagctgtcagaaagatttatcgctacactacttagtaacttacttaccccaaataatccaaatagggaaggatatttcatttagcaccacctgaatatttctaaaattgagggcttccttttataaactacagatagtccaaattgtatgccaggattctgctagctcagcagaaacaccagctgcctgaagcaggccattctcagccacaatttaggtagtatcctttgcacttagtcacaaacccagatattctgtcattattcaacattcatctaatgcccacaactgaagaattaacaaagtatggcaaaaataataacagtagtaagactagaaacaatgctacaattttctttgtatatgtccatttaaagtcacaattttaaacaacttgtcagaatgcagatccactgagaattagaaacatgatataaaatatattctaagcatctcatgaatggaactattcatcctaatttttcatagtaaaatctccattccaactgggaaggaaaggaaaccatctaaatgggtgatgattccaccagaaagataaagagccagaagtgatttagacatgaagattatgcaatttcagataggttgtgtgtagcatcaacagccactgtcataaagattaaaaatagacccagatgaagaaagaataagtgtgaaaggtatcgatgaattttatatacatatattactagttactggaacagaagatttatgtccttttctttgcaatgcactgggtcctatgtttatcatagaaggatgcaagcaggaagaatgtgggtttcccacctatgtctgcaggatcccgcaaaaactgtcaagagagaaacctccaaacacaagagatgaacactcctgtctgccttctattccctgagctggcaaacaacagggagcaattcaagatacatctttgtgtgttactttcataggcagcgtggagtttcccacgtgtcatgttttcagggaaagcacatctgtctcactggaaggacttgagatggatgtgttgccctcacattttcttgaatctttgcattctctgaatgctatctgcttctctgagcctatttcttcccaatggctctgagtcacaaatgtgctacttggccttctaaaacatatcgcttgggacactacatgcccaagaccaaggatgggtattaaatcaatttcaggctttacacattttcatcagatttgctctcatgataaaccattttatcttgaagatatttttgtacattgaagagtacctttcaaactctcaggagaataggagtcagcataaagaaatgccacagaatagttgttaagcataatggaggcatgcagtatttagtcaaggatgaaattatgcttaagagcttgaagtttgccgaggtattcaactatttaatattgtacttggtatagctattacagtgtctttgtagatttcatgaatgccaattatttctcttgagtattccttcaggactgacacaggacataatacctgaaatgacagacttttaatgttttaatgagtagagtaattaactaggaattaaaattttctctctgttacatccataattcatgtatatctagtttgagatgaggtggcagtgtctccggctatgaaaaactacattttctctgtgctccatcaaggcaaatctttccgcatcaccacacaattcttacccattgcatgaactgggaagcatcttcctgatgtgaaaaaaagttagtgttaacaggagaggttatctgatcttgccaccatattcaaattattctcttcttctgagttggcagttccccctttgactctccagtttcaccaggtagttaaggtttgggaatctatcaaaacccgtttgaatgctcacattgctgatatatgccctccctaggatatacttagccttgctgtcatattagaatgtgcatgtgtcccaggagccaactaggagtctattttcccactctgcattccccaattagtcagttctgagggtttttattgtcagcacctgtaacacacaatatctaatttgaatcactgttggaaagttaagaaaaagaacctatttgataggtaaggtccagcctcctgtgatgattaattttattagcagctactgaacccagatacttaaatcaccagtattctaatgacttataaatttgtttttaagctgaaaataacatttaaatcagtagattttaataaaacagcttccttctcatcctgtaggtgggtattatctaatcacttgatggcataaatacaaaaagacttatgcaccagaaataggaattcagccaacaagagccttcagcttgccatgaaagagtctcattgtttctcttttttaaactttttatttatttaaaaggaattttactatatgaatgtgcactctttgggtatatcccaagagtggaattgcttgatcttgacgtagactgattcccattttcctgagaaactgccatactgatttccaaagtggttgtacaagttcccactcccaccagaaatggaggagtgtacctctttctccacatcctctccatcatagactgtcattggtgttattgattttagccattctgataggagtaagatggtatctcagagtggctttgagctgcatttccctcatagctaagtatgttgagcactttcttaaatgtctttcaggcattttagattcctctgttgagaattctctatttagttctgcactccactttttaattgcattgtttggtgttttggtggctagctttttgggttcaatgtgtattttggtgatcagctctctgtcagatgtgagattggtgaagatcttttcccattttgtgagctggtgttttgtcttgctgcctgtgtcctgcaccttacagaagcttctcagtttcaggaggtcccatttattaattgtagatctcaatctttgtgctactggtgatatgttcaggaagccgtctcctgtaccagtttgtttgagggtatcaactaccttctcttctagtaggttcagtgtgcctgagtttatgttgaggtctttgatccatttggacttagggtctaccttgttacctagtttctcaggagttatggagggtctcattgtctctgagtatctctgaattcacatatcaaactttttgtttctctggagaactctaataaacctccttaattagaatattatgatttttataacaagattaaggttacactatacactatcaaatacagagttatcagtacaacatcataaaaagaatagtcaccacttttgcatatttttgatagactattaaatttaaaaccactccaccaattcacctaatgaagctaaaaactgcattgacattaagctgcaagacctggccctaaaacccacattagggccacaaactcagggtatataagactatgactcatcacacacaaaagggctgtttccttccttatcatttagaatgagatattacgctattatttttatgcagaacagaaccaaaatgactaccaattaaaatggaaggcatttcagtcttgattgttgtgaaaggattcatattctattaagtgttgtcagaagccttaaaaaagtttgtaaatgacagggcatgttagaagatctgtagcatacaggcaggggatgaatgcaaataaagtgtgagccctctcatttctttcaaaggaaacatcttccaatcacacattctgtcataaaaattcacaaggcatgatgaattagaaacaaattgcattgtcaccaaagtaataggctgactagattatacctcctgtatgaaaattatgctagatacacaaacataaagcttgaagaagcttctttgatgtcaaaaaggtaaaagcagtaaataccaattactgtcttaacagtcaagcttaaagcttttacatgacaattaggtgtcttagaaatcctaatggctacagttagaaagaggaaaatcttgaaaacctacagactatcctccaggttggatgtgccctcaatttcataatatgacataaaaagttatcttgtcaagaagacagatcatttagaagttggagtaatgttagtttctcaactgatcttactgtcccattgtctttgacaaaacactgtctgctggtctgtgttatagactagtgtggaaacattagattttggagaaaaggagaaaaatatgagctgggcatgtagaatatgagcagagcaggtagaatcacatgctacgcaagcaggaagacctgagtttgaacacccaatgcacatgtaaaaagccaaatgtagtggtgcaaagcctgcaactctaacaccagagcaaatgtggttactggtttgctagcttagtctagctctgtaatcagtgagtcatcctgagaggcagagcaggatatctaatgtcttcttctggcctacacacacacacacacacacacacacacacacactcatatgtacaagcatatacacaaaataaatatgtaccagtatacacatatacacatataaatgctcatgtgcagacatatacatgtacatagacagacattaaaaagtactagataaatacagctgtaagtatacaatggcattaccacataccactatatataaagacccttagtgtctctctgttttaaatatgtaattagtaggactggactgaagtatttgttcaatgataaagaaggatggcattttgacaatttaatttactattttctgttaagactttgctctgacaattatttgagttgacacatgctaatacctttcctggctaacactaatggtagcataaccctctaaataataataaagataatgcaactctccaacatcctttgttttatggagccttaagtacaaattgtctcaactgcatatcctaatctaactggatttaccattctgacaccgatgacagcaatagatttccaaagttcaaaagactcagacctgatcacaagatcttacagaagcaaaatgggtgaattttcaattagatggatacacagtgttcatggctatgtgtaactttccatagccaatctcaaaataacaacagacaagcaaaataacagacatcctctgctagccttagcataatataatcctgtaatttttgagggtgatttcttggcaagcatgactacaaaaaccatggtagacatttagaaagaaagacaatgattaaagccatggtttgtatttttttcttatctgaaaaacaatattctacaatgtaatgttacatgtcactgattttatttgttacagggggcgcaaaattgaggtaataatgagtagttttctcaaagagacatatttagaaacaacatgtggtagttacacctgtttgcccagttctaagttctggaaaatacttttctctccatttccctcactgttactcttagatgaaggctattttgcacccagaacataaatcatcaaataagaagcactttcttttctcaagtcttgctctatacttaaatatctaaagttatttgctcagtccagggatccatacataagattactcacaactaggacctgctcttggaaagtagctcttgctctcagcagcacagggtcatgattcatggttatcacttactctagagtgactcatctgtagacaagcagcaatgaaatcatcccttcttctgccctttggttcccatcattttcaatgctggtaaacatgagcatctgacagccttatctatgcctgcatccatttatgctcctgccaatcatttttaatgatgtgttagaattggaaaatgagataaatggatatttataaaaattttgcacttattttcaaatgatctgttcaagtatttgtcatactgagcttatctaataagaacaagtagaaatatcaaatgtggactacttttttcataatccccttgttcttaagctcccacaaggtgtccttctgatttatgcaaaaatcaactctcatccaggtaactgatgccatgaaccttaaagaaatgagacttctgcaagatgaatggactctttcatcaaagcttccattgaacacgccaagtatgactgatggcaccacatttaatgattccctagagaatcccagatgcttctgctttctccccactgtatattcttttatttggtaaagaaactactttactaagaatattaaccataactgcttttcggcaacctccttgtcacagctatattgaagtaagagggaagagaaagcttcactaccaacatccaccctatctgtcatgtgtttccttttaatatccttgatgagcagttgcacacaaatgccaactcatggctccctggattccagcatatgtgtgagtggatttgatcatgtgctcatgggaaagccatggtcccttcctctgcaatcacagcatgatattccaaagaagttttttttatatatattagttgaaatgatgtaacaaaaacttttatctgctctgacattcactttctccagttcactgactttcttacctctgcagtaaaacctggtagacaaatgtaattttttactttccacagaccctgaattgttaagaaccagttacatttagactctccatgttgtcttgctagaatgcaacaaacatgttatttgttctcttatacctttgaaagtcattttggttgatttaattgtactcattaattttcctaggattgtagcatgaattctaattgatattaataataaaaacatggagtcagatattgggttaaaactgaagatcagagaagcaaagcaacaagccactaaagagttctcacctctacccatgctcagactgcaagggcaaccctgtcctcaaactacatctccagactgcatgtgtctcagactgcactgaactctttctcctcccacattctattcctctctagtgctgggattaaaggcatggtatcccaagtgttgagatagcctttgtatgagatcttttttctctttagactagttcaattttgtatagctgagggtggtcttgaactaacagagatccctttgcatctgaatcccaaatgctgggtttaaaggtgtgtgccaccactgcctggcatctatggccagctagtgtggctagctttgcactctaatctttgggcaaacttgatttattagatcataaacaaaatatcaccacatttccccatttttgtctaaaataaaaaggttataactaatgtaagaaaatactgtataaaatatatacaggcaacaaatacatcaacaatgtctagtccacttgcattgaacaaattcagagaatatactccacatccattctatcttggtgattccaaagggtcatacctaatttactttctcttctaattttcattatcaaatcattgtatgtctctcaaccttttacactttacacctctttagttaactccaatatttgtctctgaggtttatattaagaacaattagaattcatgccacataggatttagagaccatacataatatttactttcatgttaaaattatctttcatccaatcactatatctacccctactactaatcaatactatttcctacattccatgttaactaatgctaccacaaaaaaattctaaatgaatgtcaaacattccaaaaggtgggatagttaaaatgctgcagatctaaagccaaattatcttgggattccccctataattagctgttttcttgtgagtgtgacctaacatccttataagtctaggtgactctttttggaatgtgcaaacagacttttagtatctgaagctcttagcagattcttccttgtttaacatggcctaaggtttccaacaatggatttgagaaattttttgatttatgactttctattttttgcaactaagaaaagaaaacttcaccaaattgttgtcactatggtgtagtatttgaggtaaactgaacctgtgttcttgggccatgttcacttaatttggctctagaattagttacctccaatttccttacaggagagaacttttgtggaatttcacaagtccaaacttacttgcatctatatgctataacaaaaagaaagacaggctgacaaaaacaaacaaacaaacaaacaaaaaacaaaaaccctttattggacaatcaaataaagcattgactagaatttttgcactttttggctgcttcacagtttgaagtgtttgcacctaaaacaaatgagagcaccatcaagagttgtgtcctcaattatttagaatttaggtgctgtatttttctttagttgaaagtcattgtgcatttcattttaagttattaaaatctcagttaaacaaatataaggattatgctcatcattcctagtatattgggtttacttatgcttatatattatatgtcaggggctttgaaagacacagtaggtaataactagtgttcaataggctcaacctaccagatgatctattctctgatgaagagccccacctgggaaggctgtggagttactggatgtggaaaccatttgctcctgtctgtagtttctctcatgagttacttcaattcttctctaagaatttcattgcttccctaagaatagttttgagtgttttcccactgcttatgtgtttatctcctgagaatatcccatctactgggcacacatatatctgtatgttgtcaagaagatgacttgtcatttacctgtataattttgatatatagaaaatatactgggacatgattcatagctgaatctatttgtcccatgaaactgtagacacctaaaggcctgctttgttctttggctcagactaactgtacacaattagctcacttttacctcagagaaagttcaaactagagtaaaaacttggtgtaaatacatcataagtttaaaaacttacagctatattcaaggtcagagttgatgatgtccaaccaatgttactacagaaaacaccctaggaaaaacataacaattcttcaattgccagtatgataacaatagacctttgtctcaaagtttgtcactgagcactgggccccactctggtctggttatagttttgttcctgaaatcttgaaatccttgtgttgccatggcaatggctcaactacttattgcttaccctaggaatgtgcttttgaccaaggagaagtaactctcggaatttaattattgtttcaagtctcctgggagaaagtttttaggctacaggaggagaagctggaggaaaaagctaggaggaattagaaataggacaggaaattagactatacatagaaaaataaagagatgtattcataaaagcacatagctagagaaaaaagtccttttacccattgtagtttctgattctgaaccctgaagagagtgcatagagatagtacacattctttagccaacctctctctttgtgtgtttgtgacacagactctatgtgctataatagacatctaacagtgcctatctcagaacacctgtgagatagtgaagctttagttcctgaccatcacaatcttgttcagtggtattgaaaagtaatcctggtgttaactgtgacagttttttcaaggcaaaaactaaataaaatggaaacaggaaagatgggaacatgtaaagtgtctatctttctatagatgaacttggaaaattgtcttactgatacccacaattaaaaaatagacaagataaaatagcacaatatcttagggagaatgtctcttgtctatgtaactatataaatacaatcaggcttagattacgaggaggagaggtattgaaatagctgtctaatttttatgtgggcaacagatgcttgactaactcaagatatcaacaaggctatgaaaccacaggctataatgctgtcccatgaggtgttacatctgggaattgaaaaaagatgcagctcactcaattgttagcttaactgtgtgaactgctgttgctattaaaacttgaattttgaaactttacctgatttatcacatcactccaaaagcttaaagtaagctaattctatttataaatttagagcgagccaggttttggtggcacatgcctttaatcccagcacccgagaggcagaggcaggcagatctctgtgagttggaggacagcctggtctctagattgagtgccaggataggctccaaagctacacagagaaaccctgtctcaaaaaaacaataaataaataaataaataaataaataaataaataaataaatttagagtgacacacactgaaattttaagagttctagtacttaagcagaattgaaaagataactctcagttatcaaaaattatagaaggagctcctgacctgccattttatcttggagggtgttactattcatttattcattcattcatttattcattcacccattgcagattcattctccttttttcccatttctggcttgtttcatcagtatgataatctaggtagatagatgatagatattccttttatatagagatagacacacgctgaagtgtgttacaagcactctctattttctggcctgacatgtcccgctgcccttctgaaccccaaagaaatacatggatgttgtattagttataaagctgttggccgtgggcttggatttcttattgaccagctctgtcttaattattaatccatttctattaattcatgtatttccatgtggtcttggcttacctgggaattcaagacctacaactcctttgccttttacaggatgacttctcagcctctccacagagaagagagtgatttcttgtttgtccctgcttatatcatgattctgcccagctatgtcacttcctgtctggccaatcagcctatcagtgttttattcattaacaaagaagagaaacatatatacagaagaacatcccccatcagaagtgtcattggaccatgtttaaaatctaagcctagtacttttaagcataatactatttcttccattatttcttttttttccatttatttaaagtagaaacaagattgttttacatgtcaatcccagtcctttctccctcctctcctaccctgaccccactaacaccctacctattccataccctttctgctccccaaggagggtgaagccttaacttagacttattagctcaagtgcatattagtagaaaatacagtattgagatactttaataaaccaaaatagcaatgctaaaataaaaatgcatgccagctaaactggtagagtatatttacacctgtcaaaatttgtttagaagttgggggtatctgatgtatctgatgtcttttttttttcatgagataaaagtagcatgttttacaacattacaaaattaagtcacacaaaagcaacatggtgagataaatcatattactacacaaaagcagagttttacccattgcctgagggaaaagaaacttaccttaacaattgcatgatgcctcagagcagtgaattttaagttgtgataaaaatcccttcttcagcctatcagaagaagttctcctgaggctcatgtgtgaatgggcttttaacaaatttctctcttgctttcaaattataaacaccactcctcacaccacatatttagtccaatattttcttaagcaacagctgtgcagactctttcctaatgtccactgcatatgagcaatgagaatttcaaggcatggatcattttgttaatgttcctgatgcatgtttgcttaccctcccaaattcaattcctggaaacatagttagcaggtttaatagcattcatggtgagttttatacacgtaagtgtgatcaggatccagatacatgttgccaaagtatgtctcacccagaagtccagaaaacagccaaagcacgccttaaaaagcatgtagagaaacttgctcactccttgtctcctgaaggagcctttaatcttcactgacctttctaagtaattgnnnnnnnnnnnnnnnnnnnnnnnnnnnnnnnnnnnnnnnnnnnnnnnnnnnnnnnnnnnnnnnnnnnnnnnnnnnnnnnnnnnnnnnnnnnnnnnnnnnnnnnnnnnnnnnnnnnnnnnnnnnnnnnnnnnnnnnnnnnnnnnnacagtctattctttagtttttttttcacctgtcatttgttatattggtcttttccatgagtgaagacatgaacacacaaatctttctttcccttataaaacagttcactgtaaattgatcatatagaagtttaagttactgttttgaagcattccaatgaaaatgaagtacatttacttagtcaaattatggttcatgattcttaattttttattttatcgtgtgtgtgtgtgtgtgtgtgtgtgtgtgtgtgtgtgtgtgtgctgaggtgtgtgtgtgtgtgtgctgagtgtaggtcatgcaaatgcaggtgtccatggagctcagaatgttggatcccatgtatctggagttataggcagttgtgggtgctgagaactgaaccttagtcctctggaagagaagttagtgctcttatccattgagtcatttctgagctccagtgtcacttctcaacataaagagattcaacagaaatgcactctggcaagcagaagaggataatcaaaagtccaaaagaatcttcaaatacatggtaaattacaagccagtctgtgcaacatgaaactttttccttaaaaaacaaaaagaaattcagtgtgaatattaaaattatccaatctggctagagcttagattctccaaatgcaacagctaagaactgcttaagaagaggtggtaaggtggacagtcttcaggacagagcctgtggtaatgactcatgtccttattgcagatcacagtgcttatgctgtgatttagttactgaaatagtgagcccactccccttgcatatacatcctcctctatgctgtcacaacttctcatgttacacagtatcaaggtcatttccagatatctctgcatatatcactagacttctcagctccagaaacaatagctgaatcagcctcacttctttacaaattgccttgtctactgtactctgtgacagcaatggaaaacaggtgaaggaaagacctgaaagtcatataactgaatggctcattgcacttgaatggcacgaaaactcttgaaaaccttattttaaataaaacaatacaatatgtcttggggattttactacagaagtcgtgacataaagttgcaaagagactcaattctttattggtgacatctatttctcttctataattctattacactactgagtttaaatgttttctttactcaaacccacaagcaggtaataatagaataggctttcagggatgatatccaaattaagatcagatatattgtagcttttaacttaaccagtgaagactgagcagatgaaaaagaaatctcctctctttctctgatgtcacccacagggcaataaccacatgcttcattctctgttcccaccaggactggaaagaatcgtttctaataagtgtaacatactcagatgtaagaaatagtcaggaaaaagagttggaattcctccttttgtccccatgtccttaatgtgaaagccaatcatcatcacttacacatctaggctgagaagccatacaatcaacaagttctcagaagcttgcttcaggctttctcagtgacgaacttcaaaatgtgtaacaacagtgtcctttgcactgtttcttccctcctggggagatttctattgagagcaggtgaatacttggggtgcctctgaggtcaattctaactcagggatgtgatgctatttgtctttagtcatgggatactgactttaacaaaccccaccaacccttgtacaagacctgatggaattcttatttcacatgaatttcaccgcctgtgagtttctgtttatttgtatctgagtaataggagcttcaactaaagtagaaaagcagacatgcaaatttttgtgttttacaatatgtatccattgctttcatttttgcatcttccattgcagtttctggctgccatatggctctctttagctaaatggttttaagatggctattggatatctacctcctcattatttctgtgagctgtctcccaacacccaacctttatatgatatatgcggctgttcaaacctggatataatcccaggcattgagcaaagtaaggttgtcataggtacatgtcttcaggaaagaaacaacagtgctaagagttgtcacaatcttagtcatactccaagtttcaatacactattaatgacaatgaaatttttctcattcatgctcttggatcagtgaaaataagtccataagcagatatacatacatacaatacagaaatgactacttatttaactagcacaaaaatttcaattaatatttctaaagcatgaagaaataaaaattgtgaagatatatggagctcaagagatggctcagtggttaagagcactgactgatctcccagaaaactttggttcacttcctagtacacatatggcagctcacaattgtctgttattccagttctagggacctgacacccatggcaaaacaacaatgcatataaaataacaataaacaaattttaaaaaatgtgaagatatctttccatctactaaaaatacaaaatcacagataaggaccagtgagatctcagtgggtaaaagcacttaccactcagtctagtgattgattttgatgccttgattcacatggtgaagggaggaacaatatgcacatgcacactaagttaaatacatttaacaaaatatttaaaatctaaaataggttcccatttacttttgttcttaatggtgtttatgttgtcatggttattatgcagttagaaaatgaaaaactcatttttggtttggccaactttactgaaaaattcaaggtttgattatattcactcaccagggttctcatatcaaatatctagcaatatccaatttcttttttgaatggttttaattggctggtctatatattttatagtttctgatggactaggagtgtaagtcccttctcagtagatattcagtttcttatccattgtatttatcagagaaattgtctgataaatccaaaaagacactatgataaatatccagcagtccattttatcatttttatccatttttatctccaaaaatctaataatgtaaatggagttgaatcatttccttaattgccagagttctcagttatcaaacatgaagcgacatcaaagg
